(19) United States
(12) Patent Application Publication
(10) Pub. No.: US 2011/0154530 A1
(43) Pub. Date: Jun. 23, 2011

(54) Plants with Increased Yield by Increasing or Generating One or More Activities in a Plant or a Part Thereof

(75) Inventors: Oliver Bläsing, Potsdam (DE); Oliver Thimm, Neustadt (DE); Piotr Puzio, Mariakerke (Gent) (BE)

(73) Assignee: BASF Plant Science GmbH, Ludwigshafen (DE)

(21) Appl. No.: 13/059,147

(22) PCT Filed: Aug. 19, 2009
(86) PCT No.: PCT/EP2009/060708

§ 371 Date: Feb. 15, 2011

(30) Foreign Application Priority Data
Aug. 19, 2008 (EP) 08162607.9

(51) Int. Cl. A01H 1/06; A61K 39/395; C12Q 1/68; C12Q 1/02; C12P 21/06; C12N 15/01; C07K 14/39; C12N 5/10; C12N 15/63; A61K 38/00; A61K 31/7088; C07K 14/415; C07K 16/16; C07H 21/04; A01H 5/00; A01H 5/10

(52) U.S. Cl. 800/276; 424/139.1; 435/6.1; 435/29; 435/69.1; 435/441; 435/411; 435/412; 435/414; 435/415; 435/416; 435/417; 435/419; 435/320.1; 514/1.1; 514/44 R; 530/350; 530/387.9; 536/23.6; 800/298; 800/312; 800/314; 800/317; 800/317.1; 800/317.2; 800/317.3; 800/317.4; 800/320; 800/320.1; 800/320.2; 800/320.3; 800/322

(57) ABSTRACT

This invention relates generally to a plant cell with increased yield, preferably under condition of transient and repetitive abiotic stress as compared to a corresponding non-transformed wild type plant cell by increasing or generating one or more activities of Yield-Related Proteins (YRP) and/or Yield and Stress-Related Proteins (YSRP) in plants.

[0001] The present invention disclosed herein provides a method for producing a plant with increased yield as compared to a corresponding wild type plant comprising increasing or generating one or more activities in a plant or a part thereof. The present invention further relates to nucleic acids enhancing or improving one or more traits of a transgenic plant, and cells, progenies, seeds and pollen derived from such plants or parts, as well as methods of making and methods of using such plant cell(s) or plant(s), progenies, seed(s) or pollen. Particularly, said improved trait(s) are manifested in an increased yield, preferably by improving one or more yield-related trait(s).

[0002] This invention relates generally to a plant cell with increased yield, preferably under condition of transient and repetitive abiotic stress as compared to a corresponding non-transformed wild type plant cell by increasing or generating one or more activities of Yield and Stress-Related Proteins (YSRP) in plants.

[0003] In particular, this invention relates to plants tailored to grow under conditions of transient and repetitive abiotic stress and/or of nutrient deficiency.

[0004] The invention also deals with methods of producing and screening for and breeding such plant cells or plants.

[0005] Population increases and climate change have brought the possibility of global food, feed, and fuel shortages into sharp focus in recent years. Under field conditions, plant performance, for example in terms of growth, development, biomass accumulation and seed generation, depends on a plant's tolerance and acclimation ability to numerous environmental conditions, changes and stresses. Since the beginning of agriculture and horticulture, there was a need for improving plant traits in crop cultivation. Breeding strategies foster crop properties to withstand biotic and abiotic stresses, to improve nutrient use efficiency and to alter other intrinsic crop specific yield parameters, i.e. increasing yield by applying technical advances. Plants are sessile organisms and consequently need to cope with various environmental stresses. Biotic stresses such as plant pests and pathogens on the one hand, and abiotic environmental stresses on the other hand are major limiting factors for plant growth and productivity, thereby limiting plant cultivation and geographical distribution. Plants exposed to different stresses typically have low yields of plant material, like seeds, fruit or other produces. Crop losses and crop yield losses caused by abiotic and biotic stresses represent a significant economic and political factor and contribute to food shortages, particularly in many underdeveloped countries.

[0006] Plants are exposed during their life cycle also to heat, cold and salt stress. The protection strategies are similar to those of drought resistance. Since high salt content in some soils results in less available water for cell intake, its effect is similar to those observed under drought conditions. Likewise, under freezing temperatures, plant cells loose water as a result of ice formation that starts in the apoplast and withdraws water from the symplast (McKersie and Leshem, 1994. Stress and Stress Coping in Cultivated Plants, Kluwer Academic Publishers). Physiologically these stresses are also interconnected and may induce similar cellular damage. For example drought and salt stress are manifested primarily as osmotic stress, leading to the disruption of homeostasis and ion distribution in the cell (Serrano et al., 1999; Zhu, 2001a; Wang et al., 2003). Oxidative stress, which frequently accompanies high temperature, salinity or drought stress, may cause denaturation of functional or structural proteins (Smirnoff, 1998). As a consequence these abiotic stresses often activate similar signaling pathways (Shinozaki and Ymaguchi-Shinozaki, 2000; Knight and Knight, 2001; Zhu 2001b, 2002) and cellular responses, e.g. the production of certain stress proteins, anti-oxidants and compatible solutes (Vierling and Kimpel, 1992; Zhu et al., 1997; Cushman and Bohnert, 2000).

[0007] Drought, heat, cold and salt stress have a common theme important for plant growth and that is water availability. Plants are typically exposed during their life cycle to conditions of reduced environmental water availability. Most plants have evolved strategies to protect themselves against these conditions of low water or desiccation. However, if the severity and duration of the drought are too great, the effects on plant development, growth and yield of most crop plants are profound. Such conditions are to be expected in the future due to climatic change. According to one accepted scenario of climate change, not only the weather is more variable, but the average temperature is hotter and the average rainfall is less than in the past. Most plants are not able to keep up the adaption of their protection strategies to the climatic change. Continuous exposure to drought causes major alterations in the plant metabolism. These great changes in metabolism ultimately lead to cell death and consequently yield losses.

[0008] Agricultural biotechnology has attempted to meet humanity's growing needs through genetic modifications of plants that could increase crop yield, for example, by conferring better tolerance to abiotic stress responses or by increasing biomass. Crop yield is defined herein as the number of bushels of relevant agricultural product (such as grain, forage, or seed) harvested per acre. Crop yield is impacted by abiotic stresses, such as drought, heat, salinity, and cold stress, and by the size (biomass) of the plant. Traditional plant breeding strategies are relatively slow and have in general not been successful in conferring increased tolerance to abiotic stresses. Grain yield improvements by conventional breeding have nearly reached a plateau in maize. The harvest index, i.e., the ratio of yield biomass to the total cumulative biomass at harvest, in maize has remained essentially unchanged during selective breeding for grain yield over the last hundred years. Accordingly, recent yield improvements that have occurred in maize are the result of the increased total biomass production per unit land area. This increased total biomass has been achieved by increasing planting density, which has led to adaptive phenotypic alterations, such as a reduction in leaf angle, which may reduce shading of lower leaves, and tassel size, which may increase harvest index.

[0009] Agricultural biotechnologists use measurements of other parameters that indicate the potential impact of a transgene on crop yield. For forage crops like alfalfa, silage corn, and hay, the plant biomass correlates with the total yield. For grain crops, however, other parameters have been used to estimate yield, such as plant size, as measured by total plant dry weight, above-ground dry weight, above-ground fresh weight, leaf area, stem volume, plant height, rosette diameter, leaf length, root length, root mass, tiller number, and leaf number. Plant size at an early developmental stage will typically correlate with plant size later in development. A larger plant with a greater leaf area can typically absorb more light and carbon dioxide than a smaller plant and therefore will likely gain a greater weight during the same period. There is a strong genetic component to plant size and growth rate, and so for a range of diverse genotypes plant size under one environmental condition is likely to correlate with size under another. In this way a standard environment is used to approximate the diverse and dynamic environments encountered at different locations and times by crops in the field.

[0010] At the moment many genetical and biotechnological approaches are known in order to obtain plants growing under conditions of abiotic stress.

[0011] These approaches are generally based on the introduction and expression of genes in plant cell coding for different enzymes as disclosed for example in WO2004011888, WO2006032708, US20050097640, US 20060037108, US20050108791, Serrano et al. (1999; Scientia Horticulturae 78: 261-269) and many others.

[0012] The expression of genes from the family of glutaredoxin and thioredoxin confers increase tolerance to environmental stress, especially to salinity or cold (EP 1 529 112 A). These plants had higher seed yields, photosynthesis and dry matter production than susceptible plants. Nothing is known about the development of these plants under condition of sparsely nutrient disposability.

[0013] Often the transformed and stress resistant plants exhibit slower growth and reduced biomass, due to an imbalance in development and physiology of the plant, thus having significant fitness (Kasuga et al., 1999, Danby and Gehring et al., 2005). This leads to severe biomass and yield loss. Sometimes the root/shoot dry weight ratio increase as plant water stress develops. The increase is mostly due to a relative reduction in shoot dry weight. The ratio of seed yield to above-ground dry weight is relatively stable under many environmental conditions and so a robust correlation between plant size and grain yield can often be obtained. These processes are intrinsically linked because the majority of grain biomass is dependent on current stored photosynthetic productivity by the leaves and stem of the plant. Therefore selecting for plant size, even at early stages of development, has been used as an indicator for future potential. In some cases (US20060037108) an increased biomass, mainly a greater shoot biomass was observed after a drought treatment by withholding water for 6 to 8 days.

[0014] When soil water is depleted or if water is not available during periods of drought, crop yields are restricted. “Drought” can be defined as the set of environmental conditions under which a plant will begin to suffer the effects of water deprivation, such as decreased stomatal conductance and photosynthesis, decreased growth rate, loss of turgor (wilting), or ovule abortion. For these reasons, plants experiencing drought stress typically exhibit a significant reduction in biomass and yield. Water deprivation may be caused by lack of rainfall or limited irrigation. Alternatively, water deficit may also be caused by high temperatures, low humidity, saline soils, freezing temperatures or water-logged soils that damage roots and limit water uptake to the shoot.

[0015] Agricultural biotechnologists have tried to develop transgenic plants that exhibit increased yield, either through increases in abiotic stress tolerance or through increased biomass production.

But under field conditions plants are typically exposed during their life cycle to several periods of conditions of reduced environmental water availability. An increase in either abiotic stress tolerance or biomass does not fulfill the demands in effect.

[0016] Some genes that are involved in stress responses, water use, and/or biomass in plants have been characterized, but to date, success at developing trans-genic crop plants with improved yield has been limited, and no such plants have been commercialized.

[0017] Consequently, there is a need to identify genes which confer resistance to various combinations of stresses or which confer improved yield under optimal and/or suboptimal growth conditions. There is a need, therefore, to identify additional genes that have the capacity to increase yield of crop plants.

[0018] There is a need to identify genes expressed in plants that have the capacity to confer increased resistance to transient and repetitive abiotic stress to its host plant and to other plant species, additionally to confer shortened convalescent after the stress period and increased yield over the life cycle, specially at final harvest.

[0019] Accordingly, in one embodiment, the present invention provides a method for producing a plant having an increased yield as compared to a corresponding wild type plant whereby the method comprises at least the following step: increasing or generating in a plant one or more activities (in the following referred to as one or more “activities” or one or more of “said activities” or for one selected activity as “said activity”) selected from the group consisting of phosphoenolpyruvate carboxylkinase, arginine/alanine aminopeptidase, D-alanyl-D-alanine carboxypeptidase, diacylglycerol pyrophosphate phosphatase, dityrosine transporter, farnesyl-diphosphate farnesyl transferase, NAD+-dependent betaine aldehyde dehydrogenase, serine hydrolase, transcriptional regulator involved in conferring resistance to ketoconazole, uridine kinase, yal043c-a-protein, ybr071w-protein, and ydr445c-protein in a cell, the cytoplasm or a sub-cellular compartment or organelle or tissue indicated herein, e.g. as shown in table I.

[0020] In one embodiment, the present invention provides a method for producing a transgenic plant cell with these traits by placing the “yield and stress related protein” YSRP at disposal.

[0021] In a further embodiment, the invention provides a transgenic plant that over-expresses an isolated polynucleotide identified in Table I in a cell, the cytoplasm or a sub-cellular compartment or organelle or tissue indicated herein. The transgenic plant of the invention demonstrates an improved yield or increase d yield as compared to a wild type variety of the plant. The terms “improved yield” or “increased yield” can be used interchangeable.

[0022] The term “yield” as used herein generally refers to a measurable produce from a plant, particularly a crop. Yield and yield increase (in comparison to a non-transformed starting or wild-type plant) can be measured in a number of ways, and it is understood that a skilled person will be able to apply the correct meaning in view of the particular embodiments, the particular crop concerned and the specific purpose or application concerned.

[0023] As used herein, the term “improved yield” or the term “increased yield” means any improvement in the yield of any measured plant product, such as grain, fruit or fiber. In accordance with the invention, changes in different phenotypic traits may improve yield. For example, and without limitation, parameters such as floral organ development, root initiation, root biomass, seed number, seed weight, harvest index, tolerance to abiotic environmental stress, leaf formation, phototropism, apical dominance, and fruit development, are suitable measurements of improved yield. Any increase in yield is an improved yield in accordance with the invention. For example, the improvement in yield can comprise a 0.1%, 0.5%, 1%, 3%, 5%, 10%, 15%, 20%, 30%, 40%, 50%, 60%, 70%, 80%, 90% or greater increase in any measured parameter. For example, an increase in the bu/acre yield of soybeans or corn derived from a crop comprising plants which are transgenic for the nucleotides and polypeptides of Table I resp. II, as compared with the bu/acre yield from untreated soybeans or corn cultivated under the same conditions, is an improved yield in accordance with the invention. The increased or improved yield can be achieved in the absence or presence of stress conditions.

[0024] For example, enhanced or increased “yield” refers to one or more yield parameters selected from the group consisting of biomass yield, dry biomass yield, aerial dry biomass yield, underground dry biomass yield, fresh-weight biomass yield, aerial fresh-weight biomass yield, underground fresh-weight biomass yield; enhanced yield of harvestable parts, either dry or fresh-weight or both, either aerial or underground or both; enhanced yield of crop fruit, either dry or fresh-weight or both, either aerial or underground or both; and preferably enhanced yield of seeds, either dry or fresh-weight or both, either aerial or underground or both.

[0025] For example, the present invention provides methods for producing transgenic plant cells or plants which can show an increased yield-related trait, e.g. an increased tolerance to environmental stress and/or increased intrinsic yield and/or biomass production as compared to a corresponding (e.g. non-transformed) wild type or starting plant by increasing or generating one or more of said activities mentioned above.

[0026] Said increased yield in accordance with the present invention can typically be achieved by enhancing or improving, in comparison to a non-transformed starting or wild-type plant, one or more yield-related traits of a plant. Such yield-related traits of a plant the improvement of which results in increased yield comprise, without limitation, the increase of the intrinsic yield capacity of a plant, improved nutrient use efficiency, and/or increased stress tolerance.

[0027] The frequency of water deficits during the life cycle of a plant varies with climate. This can be classified finely into mega-environments used by CIMMYT to guide its breeding programmes in wheat and maize.

A mega-environment is a broad, not necessarily contiguous geographic area with similar biotic and abiotic stresses and cropping system requirements. In fact a mega-environment is defined by crop production factors (temperature, rainfall, sunlight, latitude, elevation, soil characteristics, and diseases), consumer preferences (the color of the grain and how it would be used), and wheat growth habit. Researchers identified six mega-environments for spring wheats and three each for facultative and winter wheat. Such mega-environments are feasible for every plant species including crops.

[0028] It is object of the present invention to put a transgenic plant cell, a plant or a part thereof with increased yield, e.g. an increased yield-related trait, for example enhanced tolerance to abiotic environmental stress, for example an increased drought tolerance and/or low temperature tolerance and/or an increased nutrient use efficiency, intrinsic yield and/or another mentioned yield-related trait, preferably under condition of transient and repetitive abiotic stress as compared to a corresponding non-transformed wild type plant cell, a plant or a part thereof at disposal when cultivated in mega-environmentals with low rainfall, as for example the wheat mega-environments ME1, ME4, ME4A, ME4B, ME4C, ME5, ME5B, ME6, ME6B, ME9, ME12 or the respective mega-environment for the specific plant species.

[0029] In order to compare the yield of plants of the same species in correlation with environment conditions the parameter of yield potential is significant. Yield potential is defined as the yield of a plant when grown in environments to which it is adapted, with nutrients and water non-limiting and with pests, diseases, weeds, lodging, and other stresses effectively controlled. “Yield” refers to the mass of product at final harvest.

Under field conditions the yield potential will not be achieved. Nevertheless, it is a parameter which defines the optimal cultivating conditions in an mega-environment because only under optimal conditions the yield potential will be achieved.

[0030] There is still a need to identify genes coding for polypeptides with a activity, which, when generated or increased, confers increased yield, preferably under condition of transient and repetitive abiotic stress, specially to confer increased yield, preferably under sub-optimal growing condition, preferably under conditions of water deficiency. It is an object of this invention to identify new methods to confer stress tolerance and/or resistance in plants or plant cells.

It is further an object of this invention to put plants at disposal, which are water stress resistant and exhibit additionally under conditions of transient and repetitive abiotic stress, preferably cycling drought, an equal, preferably an increased biomass production.

[0031] There is further a need to identify genes expressed in stress tolerant plants that have the capacity to confer increased yield, e.g. an increased yield-related trait, for example enhanced tolerance to abiotic environmental stress, for example an increased drought tolerance and/or low temperature tolerance and/or an increased nutrient use efficiency, intrinsic yield and/or another mentioned yield-related trait, preferably under condition of transient and repetitive abiotic stress, specially under any sub-optimal growing condition which does not correspond to the conditions where the yield potential can be achieved.

[0032] Accordingly, in one embodiment, the present invention provides a method for producing a transgenic plant cell with increased yield, e.g. an increased yield-related trait, for example enhanced tolerance to abiotic environmental stress, for example an increased drought tolerance and/or low temperature tolerance and/or an increased nutrient use efficiency, intrinsic yield and/or another mentioned yield-related trait, preferably under condition of transient and repetitive abiotic stress as compared to a corresponding non-transformed wild type plant cell by increasing or generating one or more activities selected from the group consisting of: phosphoenolpyruvate carboxylkinase, arginine/alanine aminopeptidase, D-alanyl-D-alanine carboxypeptidase, diacylglycerol pyrophosphate phosphatase, dityrosine transporter, farnesyl-diphosphate farnesyl transferase, NAD+-dependent betaine aldehyde dehydrogenase, serine hydrolase, transcriptional regulator involved in conferring resistance to ketoconazole, uridine kinase, yal043c-a-protein, ybr071w-protein, and ydr445c-protein.

[0033] In one embodiment of the invention the proteins having a activity selected from the group consisting of: phosphoenolpyruvate carboxylkinase, arginine/alanine aminopeptidase, D-alanyl-D-alanine carboxypeptidase, diacylglycerol pyrophosphate phosphatase, dityrosine transporter, farnesyl-diphosphate farnesyl transferase, NAD+-dependent betaine aldehyde dehydrogenase, serine hydrolase, transcriptional regulator involved in conferring resistance to ketoconazole, uridine kinase, yal043c-a-protein, ybr071w-protein, and ydr445c-protein. and the polypeptides as depicted in table II, column 5 and 7 are named as “yield related protein” YRP or “yield and stress related protein” YSRP.

[0034] In one embodiment the term “increased yield” refers to any biomass increase.

In one embodiment the term “increased yield, preferably under condition of transient and repetitive abiotic stress” refers to increased yield and increased resistance to condition of transient and repetitive abiotic stress, e.g. increased tolerance to transient and repetitive abiotic stress.
In an embodiment of the present invention, plant yield is increased by increasing one or more of yield-related traits selected from one or more abiotic stress tolerance(s).
Generally, the term “increased tolerance to stress” can be defined as survival of plants, and/or higher yield production, under stress conditions as compared to a non-transformed wild type or starting plant.
For the purposes of the description of the present invention, the terms “enhanced tolerance to abiotic stress”, “enhanced resistance to abiotic environmental stress”, “enhanced tolerance to environmental stress”, “improved adaptation to environmental stress” and other variations and expressions similar in its meaning are used interchangeably and refer, without limitation, to an improvement in tolerance to one or more abiotic environmental stress(es) as described herein, preferably transient and repetitive abiotic stress and as compared to a corresponding (non-transformed) wild type (or starting) plant.
As used herein, the term “abiotic stress” refers to any sub-optimal growing condition and includes, but is not limited to, sub-optimal conditions associated with drought, cold or salinity or combinations thereof. In preferred embodiments, abiotic stress is drought and low water content. Wherein drought stress means any environmental stress which leads to a lack of water in plants or reduction of water supply to plants. Furthermore this stress is transient and repetitive.
In one embodiment of the invention the term “increased yield, preferably under condition of transient and repetitive abiotic stress” relates to an increased resistance to water stress, which is produced as a secondary stress by cold, and/or salt, and/or, of course, as a primary stress during drought.
In one embodiment of the invention the term “increased yield, preferably under condition of transient and repetitive abiotic stress” relates to an increased yield, preferably under conditions of water stress, which is produced as a secondary stress by cold, and/or salt, and/or, of course, as a primary stress during drought.

[0035] As used herein, the term “sub-optimal growing condition” refers also to limited nutrient availability and sub-optimal disposability.

In one embodiment, limited nutrient availability is drought and low water content.
In one embodiment, limited nutrient availability is a sub-optimal disposability in nutrients selected from the group consisting of phosphorus, potassium and nitrogen.
In one embodiment, limited nutrient availability is a sub-optimal disposability of nitrogen.
In one embodiment, the biomass of the transgenic plants of the invention is increased by the yield-related trait of an enhanced nutrient use efficiency. An improvement or increase in nutrient use efficiency of a plant may be manifested by improving a plant's general efficiency of nutrient assimilation (e.g. in terms of improvement of general nutrient uptake and/or transport, improving a plant's general transport mechanisms, assimilation pathway improvements, and the like), and/or by improving specific nutrient use efficiency of nutrients including, but not limited to, phosphorus, potassium, and nitrogen.

[0036] So, the increased plant yield can also be mediated by increasing the “nutrient use efficiency of a plant”, e.g. by improving the use efficiency of nutrients including, but not limited to, phosphorus, potassium, and nitrogen. For example, there is a need for plants that are capable to use nitrogen more efficiently so that less nitrogen is required for growth and therefore resulting in the improved level of yield under nitrogen deficiency conditions. Further, higher yields may be obtained with current or standard levels of nitrogen use. Accordingly, plant yield is increased by increasing nitrogen use efficiency (NUE) of a plant or a part thereof. Because of the high costs of nitrogen fertilizer in relation to the revenues for agricultural products, and additionally its deleterious effect on the environment, it is desirable to develop strategies to reduce nitrogen input and/or to optimize nitrogen uptake and/or utilization of a given nitrogen availability while simultaneously maintaining optimal yield, productivity and quality of plants, preferably cultivated plants, e.g. crops. Also it is desirable to maintain the yield of crops with lower fertilizer input and/or higher yield on soils of similar or even poorer quality.

[0037] In one embodiment, the nitrogen use efficiency is determined according to the method described herein. Accordingly, in one embodiment, the present invention relates to a method for increasing the yield, comprising the following steps:

(a) measuring the nitrogen content in the soil, and
(b) determining, whether the nitrogen-content in the soil is optimal or suboptimal for the growth of an origin or wild type plant, e.g. a crop, and
(c1) growing the plant of the invention in said soil, if the nitrogen-content is suboptimal for the growth of the origin or wild type plant, or
(c2) growing the plant of the invention in the soil and comparing the yield with the yield of a standard, an origin or a wild type plant, selecting and growing the plant, which shows higher or the highest yield, if the nitrogen-content is optimal for the origin or wild type plant.

[0038] Plant nutrition is essential to the growth and development of plants and therefore also for quantity and quality of plant products. Because of the strong influence of the efficiency of nutrition uptake as well as nutrition utilization on plant yield and product quality, a huge amount of fertilizer is poured onto soils to optimize plant growth and quality.

In the present invention, the enhanced tolerance to limited nutrient availability may, for example and preferably, be determined according to the following method:
For high-throughput purposes plants are screened for biomass production on agar plates with limited supply of nitrogen (adapted from Estelle and Somerville, 1987). This screening pipeline consists of two level. Transgenic lines are subjected to subsequent level if biomass production is significantly improved in comparison to wild type plants. With each level number of replicates and statistical stringency is increased.
For the sowing, the seeds, which are stored in the refrigerator (at −20° C.), are removed from the Eppendorf tubes with the aid of a toothpick and transferred onto the above-mentioned agar plates, with limited supply of nitrogen (0.05 mM KNO₃).
After the seeds have been sown, plates are subjected to stratification for 2-4 days in the dark at 4° C. After the stratification, the test plants are grown for 22 to 25 days at a 16-h-light, 8-h-dark rhythm at 20° C., an atmospheric humidity of 60% and a CO₂ concentration of approximately 400 ppm. The light sources used generates a light resembling the solar color spectrum with a light intensity of approximately 100 μE/m²s. After 10 to 11 days the plants are individualized. Improved growth under nitrogen limited conditions is assessed by biomass production of shoots and roots of transgenic plants in comparison to wild type control plants after 20-25 days growth.
Transgenic lines showing a significant improved biomass production in comparison to wild type plants are subjected to following experiment of the subsequent level:
In case of Arabidopsis thaliana, the seeds are sown in pots containing a 1:1 (v:v) mixture of nutrient depleted soil (“Einheitserde Typ 0”, 30% clay, Tantau, Wansdorf Germany) and sand. Germination is induced by a four day period at 4° C., in the dark. Subsequently the plants are grown under standard growth conditions (photoperiod of 16 h light and 8 h dark, 20° C., 60% relative humidity, and a photon flux density of 200 μE or approximaticaly 170 μE resp.). The plants are grown and cultured, inter alia they are watered every second day with a N-depleted nutrient solution. The N-depleted nutrient solution e.g. contains beneath water

| mineral nutrient | final concentration | |
|---|---|---|
| KCl | 3.00 | mM |
| MgSO₄ × 7 H₂O | 0.5 | mM |
| CaCl₂ × 6 H₂O | 1.5 | mM |
| K₂SO₄ | 1.5 | mM |
| NaH₂PO₄ | 1.5 | mM |
| Fe-EDTA | 40 | μM |
| H₃BO₃ | 25 | μM |
| MnSO₄ × H₂O | 1 | μM |
| ZnSO₄ × 7 H₂O | 0.5 | μM |
| Cu₂SO₄ × 5 H₂O | 0.3 | μM |
| Na₂MoO₄ × 2 H₂O | 0.05 | μM |

After 9 to 10 days the plants are individualized. After a total time of 28 to 31, preferably 29 to 31 days the plants are harvested and rated by the fresh weight of the arial parts of the plants. The biomass increase is measured as ratio of the fresh weight of the aerial parts of the respective transgene plant and the non-transgenic wild type plant.
Accordingly, in one embodiment of the invention, the transgenic plant of the invention manifests a biomass increase compared to a wild type control under the stress condition of limited nutrient, preferably nitrogen availability.

[0039] In another embodiment the invention provides that the above methods can be performed such that the yield is increased in the absence of nutrient deficiencies as well as the absence of stress conditions.

[0040] In one embodiment of the invention, the term “abiotic stress” encompass even the absence of substantial abiotic stress. In the present invention, the biomass increase may, for example and preferably, be determined according to the following method:

Transformed plants are grown in pots in a growth chamber (e.g. York, Mannheim, Germany). In case the plants are Arabidopsis thaliana seeds thereof are sown in pots containing a 3.5:1 (v:v) mixture of nutrient rich soil (GS90, Tantau, Wansdorf, Germany) and optionally quarz sand.
Plants are grown under standard growth conditions.
The method may further comprise the following steps:
Pots are filled with soil mixture and placed into trays. Water is added to the trays to let the soil mixture take up appropriate amount of water for the sowing procedure. In case the plants are Arabidopsis thaliana the seeds for transgenic A. thaliana plants and their non-transgenic wild-type controls are sown in pots (6 cm diameter). Then the filled tray is covered with a transparent lid and transferred into a precooled (4° C.-5° C.) and darkened growth chamber. Stratification is established for a period of 3-4 days in the dark at 4° C.-5° C. Germination of seeds and growth is initiated at a growth condition of 20° C., 60% relative humidity, 16 h photoperiod and illumination with fluorescent light at approximately 170 μmol/m2s. Covers are removed 7-8 days after sowing. BASTA selection is done at day 10 or day 11 (9 or 10 days after sowing) by spraying pots with plantlets from the top. In the standard experiment, a 0.07% (v/v) solution of BASTA concentrate (183 g/l glufosinate-ammonium) in tap water is sprayed once or, alternatively, a 0.02% (v/v) solution of BASTA is sprayed three times. The wild-type control plants are sprayed with tap water only (instead of spraying with BASTA dissolved in tap water) but are otherwise treated identically. Plants are individualized 13-14 days after sowing by removing the surplus of seedlings and leaving one seedling in soil. Transgenic events and wild-type control plants are evenly distributed over the chamber.
Watering is carried out every two days after removing the covers in a standard experiment or, alternatively, every day. For measuring biomass performance, plant fresh weight was determined at harvest time (24-29 days after sowing) by cutting shoots and weighing them. Plants are in the stage prior to flowering and prior to growth of inflorescence when harvested. Transgenic plants are compared to the non-transgenic wild-type control plants harvested at the same day. Significance values for the statistical significance of the biomass changes can be calculated by applying the ‘student's’ t test (parameters: two-sided, unequal variance).
Biomass production can be measured by weighing plant rosettes. Biomass increase can be calculated as ratio of average weight for transgenic plants compared to average weight of wild type control plants from the same experiment.

[0041] In case the plants are Arabidopsis thaliana, the standard growth conditions are: photoperiod of 16 h light and 8 h dark, 20° C., 60% relative humidity, and a photon flux density of 220 μmol/m²s. Plants are grown and cultured. In case the plants are Arabidopsis thaliana they are watered every second day. After 13 to 14 days the plants are individualized. Transgenic events and wildtype control plants are evenly distributed over the chamber. Watering is carried out every two days after removing the covers in a standard experiment or, alternatively, every day. For measuring biomass performance, plant fresh weight is determined at harvest time (26-27 days after sowing) by cutting shoots and weighing them. Alternatively, the harvest time is 24-25 days after sowing. Besides weighing, phenotypic information is added in case of plants that differ from the wild type control. Plants are in the stage prior to flowering and prior to growth of inflorescence when harvested.

Accordingly, in one embodiment of the invention, the transgenic plant of the invention manifests a biomass increase compared to a wild type control under the stress condition of low temperature.

[0042] In-another embodiment of the present invention, said yield-related trait of the plant of the invention is an increased low temperature tolerance of said plant, e.g. comprising freezing tolerance and/or chilling tolerance. Low temperatures impinge on a plethora of biological processes. They retard or inhibit almost all metabolic and cellular processes. The response of plants to low temperature is an important determinant of their ecological range. The problem of coping with low temperatures is exacerbated by the need to prolong the growing season beyond the short summer found at high latitudes or altitudes. Most plants have evolved adaptive strategies to protect themselves against low temperatures. Generally, adaptation to low temperature may be divided into chilling tolerance, and freezing tolerance.

[0043] In one embodiment of the invention the term “increased yield, preferably under condition of transient and repetitive abiotic stress” relates to an increased cold resistance.

In one embodiment of the invention the term “increased cold resistance” relates to low temperature tolerance, comprising freezing tolerance and/or chilling tolerance.
Further, improved or enhanced “chilling tolerance” or variations thereof refers to improved adaptation to low but non-freezing temperatures around 10° C., preferably temperatures between 1 to 18° C., more preferably 4-14° C., and most preferred 8 to 12° C., 11 to 12° C.; hereinafter called “chilling temperature”.
Improved or enhanced “freezing tolerance” or variations thereof refers to improved adaptation to temperatures near or below zero, namely preferably temperatures below 4° C., more preferably below 3 or 2° C., and particularly preferred at or below 0 (zero)° C. or below −4° C., or even extremely low temperatures down to −10° C. or lower; hereinafter called “freezing temperature.
More generally, “improved adaptation” to environmental stress like low temperatures e.g. freezing and/or chilling temperatures refers to increased biomass production as compared to a corresponding non-transformed wild type plant.
Accordingly, for the purposes of the description of the present invention, the term “low temperature” with respect to low temperature stress on a plant, and preferably a crop plant, refers to any of the low temperature conditions as described herein, preferably chilling and/or freezing temperatures as defined above, as the context requires. It is understood that a skilled artisan will be able to recognize from the particular context in the present description which temperature or temperature range is meant by “low temperature”.
In the present invention, enhanced tolerance to low temperature may, for example and preferably, be determined according to one of the following methods:

[0044] In a standard experiment soil is prepared as 3.5:1 (v/v) mixture of nutrient rich soil (GS90, Tantau, Wansdorf, Germany) and sand. Pots are filled with soil mixture and placed into trays. Water is added to the trays to let the soil mixture take up appropriate amount of water for the sowing procedure. In case the plats are Arabidopsis thaliana the seeds for transgenic A. thaliana plants are sown in pots (6 cm diameter). Pots are collected until they filled a tray for the growth chamber. Then the filled tray is covered with a transparent lid and transferred into the shelf system of the precooled (4° C.-5° C.) growth chamber. Stratification is established for a period of 2-3 days in the dark at 4° C.-5° C. Germination of seeds and growth is initiated at a growth condition of 20° C., 60% relative humidity, 16 h photoperiod and illumination with fluorescent light at approximately 200 μmol/m2s. Covers are removed 7 days after sowing. BASTA selection is done at day 9 after sowing by spraying pots with plantlets from the top. Therefore, a 0.07% (v/v) solution of BASTA concentrate (183 g/l glufosinate-ammonium) in tap water is sprayed. Transgenic events and wildtype control plants are distributed randomly over the chamber. The location of the trays inside the chambers is changed on working days from day 7 after sowing. Watering is carried out every two days after covers are removed from the trays. Plants are individualized 12-13 days after sowing by removing the surplus of seedlings leaving one seedling in a pot. Cold (chilling to 11° C.-12° C.) is applied 14 days after sowing until the end of the experiment. For measuring biomass performance, plant fresh weight is determined at harvest time (29-36 days after sowing) by cutting shoots and weighing them. Plants are in the stage prior to flowering and prior to growth of inflorescence when harvested. Transgenic plants are compared to the non-transgenic wild-type control plants harvested at the same day. Significance values for the statistical significance of the biomass changes can be calculated by applying the ‘student's’ t test (parameters: two-sided, unequal variance).

Biomass production can be measured by weighing plant rosettes. Biomass increase can be calculated as ratio of average weight of transgenic plants compared to average weight of wild-type control plants from the same experiment

[0045] Transformed plants are grown in pots in a growth chamber (e.g. York, Mannheim, Germany). In case the plants are Arabidopsis thaliana seeds thereof are sown in pots containing a 3.5:1 (v:v) mixture of nutrient rich soil (GS90, Tantau, Wansdorf, Germany). Plants are grown under standard growth conditions. In case the plants are Arabidopsis thaliana, the standard growth conditions are: photoperiod of 16 h light and 8 h dark, 20° C., 60% relative humidity, and a photon flux density of 200 μmol/m²s. Plants are grown and cultured. In case the plants are Arabidopsis thaliana they are watered every second day. After 12 to 13 days the plants are individualized. Cold (e.g. chilling at 11-12° C.) is applied 14 days after sowing until the end of the experiment. For measuring biomass performance, plant fresh weight was determined at harvest time (29-30 days after sowing) by cutting shoots and weighing them. Beside weighing, phenotypic information was added in case of plants that differ from the wild type control.

Accordingly, in one embodiment of the invention, the increased cold resistance manifests in an biomass increase of the transgenic plant of the invention compared to a wild type control under the stress condition of low temperature.
In one embodiment of the invention the term “increased yield, preferably under condition of transient and repetitive abiotic stress” relates to an increased cold resistance, meaning to low temperature tolerance, comprising freezing tolerance and/or chilling tolerance.
In one embodiment of the invention the term “increased yield, preferably under condition of transient and repetitive abiotic stress” relates to an increased salt resistance.

[0046] Accordingly, in one embodiment, the present invention relates to a method for increasing yield, comprising the following steps:

(a) determining, whether the temperature in the area for planting is optimal or suboptimal for the growth of an origin or wild type plant, e.g. a crop; and
(b1) growing the plant of the invention in said soil; if the temperature is suboptimal low for the growth of an origin or wild type plant growing in the area; or
(b2) growing the plant of the invention in the soil and comparing the yield with the yield of a standard, an origin or a wild type plant and selecting and growing the plant, which shows higher or the highest yield, if the temperature is optimal for the origin or wild type plant.

[0047] Further to low nutrient availability and low temperature the term abiotic stress tolerance(s) refers for example low temperature tolerance, drought tolerance or improved water use efficiency (WUE), heat tolerance, salt stress tolerance and others. Studies of a plant's response to desiccation, osmotic shock, and temperature extremes are also employed to determine the plant's tolerance or resistance to abiotic stresses.

Stress tolerance in plants like low temperature, drought, heat and salt stress tolerance can have a common theme important for plant growth, namely the availability of water. Plants are typically exposed during their life cycle to conditions of reduced environmental water content. The protection strategies are similar to those of chilling tolerance.
Accordingly, in one embodiment of the present invention, said yield-related trait relates to an increased water use efficiency of the plant of the invention and/or an increased tolerance to drought conditions of the plant of the invention. Water use efficiency (WUE) is a parameter often correlated with drought tolerance. An increase in biomass at low water availability may be due to relatively improved efficiency of growth or reduced water consumption. In selecting traits for improving crops, a decrease in water use, without a change in growth would have particular merit in an irrigated agricultural system where the water input costs were high. An increase in growth without a corresponding jump in water use would have applicability to all agricultural systems. In many agricultural systems where water supply is not limiting, an increase in growth, even if it came at the expense of an increase in water use also increases yield.
When soil water is depleted or if water is not available during periods of drought, crop yields are restricted. Plant water deficit develops if transpiration from leaves exceeds the supply of water from the roots. The available water supply is related to the amount of water held in the soil and the ability of the plant to reach that water with its root system. Transpiration of water from leaves is linked to the fixation of carbon dioxide by photosynthesis through the stomata. The two processes are positively correlated so that high carbon dioxide influx through photosynthesis is closely linked to water loss by transpiration. As water transpires from the leaf, leaf water potential is reduced and the stomata tend to close in a hydraulic process limiting the amount of photosynthesis. Since crop yield is dependent on the fixation of carbon dioxide in photosynthesis, water uptake and transpiration are contributing factors to crop yield. Plants which are able to use less water to fix the same amount of carbon dioxide or which are able to function normally at a lower water potential have the potential to conduct more photosynthesis and thereby to produce more biomass and economic yield in many agricultural systems.
Drought stress means any environmental stress which leads to a lack of water in plants or reduction of water supply to plants, including a secondary stress by low temperature and/or salt, and/or a primary stress during drought or heat, e.g. desiccation etc.

[0048] In a preferred embodiment of the invention the term “increased yield, preferably under condition of transient and repetitive abiotic stress” relates to an increased drought resistance.

In one embodiment increased drought resistance refers to resistance to drought cycles, meaning alternating periods of drought and re-watering.
In the present invention, enhanced tolerance to cycling drought may, for example and preferably, be determined according to the following method:
Transformed plants are grown in pots in a growth chamber (e.g. York, Mannheim, Germany). In case the plants are Arabidopsis thaliana soil is prepared as 1:1 (v/v) mixture of nutrient rich soil (GS90, Tantau, Wansdorf, Germany) and quarz sand. Pots (6 cm diameter) are filled with this mixture and placed into trays. Water is added to the trays to let the soil mixture take up appropriate amount of water for the sowing procedure (day 1) and subsequently seeds of transgenic A. thaliana plants and their wild-type controls are sown in pots. Then the filled tray is covered with a transparent lid and transferred into a precooled (4° C.-5° C.) and darkened growth chamber. Stratification is established for a period of 3 days in the dark at 4° C.-5° C. or, alternatively, for 4 days in the dark at 4° C. Germination of seeds and growth is initiated at a growth condition of 20° C., 60% relative humidity, 16 h photoperiod and illumination with fluorescent light at 200 μmol/m2s or, alternatively at 220 μmol/m2s. Covers are removed 7-8 days after sowing. BASTA selection can be done at day 10 or day 11 (9 or 10 days after sowing) by spraying pots with plantlets from the top. In the standard experiment, a 0.07% (v/v) solution of BASTA concentrate (183 g/l glufosinate-ammonium) in tap water is sprayed once or, alternatively, a 0.02% (v/v) solution of BASTA is sprayed three times. The wild-type control plants are sprayed with tap water only (instead of spraying with BASTA dissolved in tap water) but are otherwise treated identically. Plants are individualized 13-14 days after sowing by removing the surplus of seedlings and leaving one seedling in soil. Transgenic events and wild-type control plants are evenly distributed over the chamber.

[0049] The water supply throughout the experiment is limited and plants are subjected to cycles of drought and re-watering. Watering is carried out at day 1 (before sowing), day 14 or day 15, day 21 or day 22, and, finally, day 27 or day 28. For measuring biomass production, plant fresh weight is determined one day after the final watering (day 28 or day 29) by cutting shoots and weighing them. Besides weighing, phenotypic information is added in case of plants that differ from the wild type control. Plants are in the stage prior to flowering and prior to growth of inflorescence when harvested. Significance values for the statistical significance of the biomass changes are calculated by applying the ‘student's’ t test (parameters: two-sided, unequal variance).

Accordingly, in one embodiment of the invention, the increased cold resistance manifests in an biomass increase of the transgenic plant of the invention compared to a wild type control under the stress condition of cycling drought.

[0050] Accordingly, in one embodiment, the present invention relates to a method for increasing the yield, comprising the following steps:

(a) determining, whether the water supply in the area for planting is optimal or suboptimal for the growth of an origin or wild type plant, e.g. a crop, and/or determining the visual symptoms of injury of plants growing in the area for planting; and
(b1) growing the plant of the invention in said soil, if the water supply is suboptimal for the growth of an origin or wild type plant or visual symptoms for drought can be found at a standard, origin or wild type plant growing in the area; or
(b2) growing the plant of the invention in the soil and comparing the yield with the yield of a standard, an origin or a wild type plant and selecting and growing the plant, which shows a higher yield or the highest yield, if the water supply is optimal for the origin or wild type plant.
Visual symptoms of injury stating for one or any combination of two, three or more of the following features: wilting; leaf browning; loss of turgor, which results in drooping of leaves or needles stems, and flowers; drooping and/or shedding of leaves or needles; the leaves are green but leaf angled slightly toward the ground compared with controls; leaf blades begun to fold (curl) inward; premature senescence of leaves or needles; loss of chlorophyll in leaves or needles and/or yellowing.

[0051] In a further embodiment of the present invention, said yield-related trait of the plant of the invention is an increased tolerance to heat conditions of said plant.

[0052] In an other preferred embodiment of the invention the term “increased yield, preferably under condition of transient and repetitive abiotic stress” relates to an confer increased yield, preferably under condition of transient and repetitive abiotic stress, specially under any sub-optimal growing condition as compared to a non-transformed wild type plant.

In one embodiment sub-optimal growing condition is any condition which does not correspond to the respective condition where the yield potential can be achieved.
In one embodiment optimal growth conditions are conditions selected from the group consisting of:

[0053] climatic and environmental conditions as they were predominantly in the last 50 25, 20, 15, 10 or 5 years over a period of 3, 6, 12 month or a cultivation period in the mega-environments known as Wheatbelt Region in Western Australia, corn belt in the U.S.A. (comprising at least one of the states of Iowa, Indiana, Illinois, Ohio, South Dakota, Nebraska, Kansas, Minnesota, Wisconsin, Michigan, Missouri and Kentucky)

[0054] climatic and environmental conditions as they were predominantly in the last 50 25, 20, 15, 10 or 5 years over a period of 3, 6, 12 month or a cultivation period in the mega-environments as mentioned for maize and wheat by CIMMYT

[0055] In one embodiment of the invention the term “increased yield, preferably under condition of transient and repetitive abiotic stress” is defined as survival of plants under transient and repetitive abiotic stress conditions longer than non-transformed wild type plant.

Transient and repetitive abiotic stress conditions means under conditions of water deficiency, in other words the plants survives and growth under conditions of water deficiency longer than non-transformed wild type plant without showing any symptoms of injury, such as wilting and leaf browning and/or rolling, on the other hand the plants being visually turgid and healthy green in color.

[0056] In one embodiment of the invention relates to a method for increasing the yield per acre or per cultivated area comprising the steps:

[0057] performing a analysis of environmental conditions to measure the level of nutrients (including water) available in the soil or rainfall per cultivating cycle,

[0058] comparing the result with the value of the respective condition with the value under optimal growing condition

[0059] cultivating a plant of the respective class/genera according to the invention in case at east one measured condition deviates for 5%, 10%, 15%, 20%, 25%, 30%, 35%, 40%, 45%, 50%, 60%, 70%, 80%, 90%, 100% or more from the value under optimal growing condition.

[0060] In one embodiment of the invention the terms “increased yield”, “increased biomass” or “increased biomass production” means that the plants exhibit an increased growth rate from the starting of first water withholding or at harvest time as compared to a corresponding non-transformed wild type plant. An increased growth rate comprises an increased in biomass production of the whole plant, an increase in biomass of the visible part of the plant, e.g. of stem and leaves and florescence, visible higher and larger stem.

In one embodiment increased yield and/or increased biomass production includes higher seed yield, higher photosynthesis and/or higher dry matter production.
In one embodiment of the invention the term “increased biomass production” means that the plants exhibit a prolonged growth from the starting of withholding water as compared to a corresponding non-transformed wild type plant. A prolonged growth comprises survival and/or continued growth of the whole plant at the moment when the non-transformed wild type plants show visual symptoms of injury.
In one embodiment of the invention the term “increased yield” means that the plants exhibit an increased covalescens period after rewatering as compared to a corresponding non-transformed wild type plant, meaning without showing any or less symptoms of injury, such as wilting and leaf browning and/or rolling, on the other hand the plants being visually turgid and healthy green in color.

[0061] According to the present invention, yield-related traits concerning an increase of the intrinsic yield capacity of a plant may be manifested by improving the specific (intrinsic) seed yield (e.g. in terms of increased seed/grain size, increased ear number, increased seed number per ear, improvement of seed filling, improvement of seed composition, embryo and/or endosperm improvements, or the like); modification and improvement of inherent growth and development mechanisms of a plant (such as plant height, plant growth rate, pod number, pod position on the plant, number of internodes, incidence of pod shatter, efficiency of nodulation and nitrogen fixation, efficiency of carbon assimilation, improvement of seedling vigour/early vigour, enhanced efficiency of germination (under stressed or non-stressed conditions), improvement in plant architecture, cell cycle modifications, photosynthesis modifications, various signalling pathway modifications, modification of transcriptional regulation, modification of translational regulation, modification of enzyme activities, and the like); and/or the like.

According to the present invention, yield-related traits concerning an improvement or increase in nutrient use efficiency of a plant may be manifested by improving a plant's general efficiency of nutrient assimilation (e.g. in terms of improvement of general nutrient uptake and/or transport, improving a plant's general transport mechanisms, assimilation pathway improvements, and the like), and/or by improving specific nutrient use efficiency of nutrients including, but not limited to, phosphorus, potassium, and nitrogen.
According to the present invention, yield-related traits concerning an improvement or increase of stress tolerance of a plant may be manifested by improving or increasing a plant's tolerance against biotic and/or abiotic stress. In the present application, biotic stress refers generally to plant pathogens and plant pests comprising, but not limited to, fungal diseases (including oomycete diseases), viral diseases, bacterial diseases, insect infestation, nematode infestation, and the like. In the present application, abiotic stress refers generally to abiotic environmental conditions a plant is typically confronted with, including conditions which are typically referred to as “abiotic stress” conditions including, but not limited to, drought (tolerance to drought may be achieved as a result of improved water use efficiency), heat, low temperatures and cold conditions (such as freezing and chilling conditions), salinity, osmotic stress, shade, high plant density, mechanical stress, oxidative stress, and the like.
According to the present invention, the improvement of yield-related traits relating to an increase of the intrinsic yield capacity of a plant and/or to a plant's tolerance to abiotic stress(es) is a particularly preferred embodiment for enhancing or improving yield of said plant.
The term “yield” as used herein generally refers to a measurable produce from a plant, particularly a crop.
Yield and yield increase (in comparison to a non-transformed starting or wild-type plant) can be measured in a number of ways, and it is understood that a skilled person will be able to apply the correct meaning in view of the particular embodiments, the particular crop concerned and the specific purpose or application concerned.
In the preferred embodiments of the present invention described herein, an increase in yield refers to increased biomass yield, increased seed yield, and/or increased yield regarding one or more specific content(s) of a whole plant or parts thereof or plant seed(s).
In preferred embodiments, “yield” refers to biomass yield comprising dry weight biomass yield and/or freshweight biomass yield, each with regard to the aerial and/or underground parts of a plant, depending on the specific circumstances (test conditions, specific crop of interest, application of interest, and the like). In each case, biomass yield may be calculated as freshweight, dry weight or a moisture adjusted basis, and on the other hand on a per plant basis or in relation to a specific area (e.g. biomass yield per acre/square meter/or the like).
In other preferred embodiments, “yield” refers to seed yield which can be measured by one or more of the following parameters: number of seed or number of filled seed (per plant or per area (acre/square meter/or the like)); seed filling rate (ratio between number of filled seeds and total number of seeds); number of flowers per plant; seed biomass or total seed weight (per plant or per area (acre/square meter/or the like); thousand kernel weight (TKW; extrapolated from the number of filled seeds counted and their total weight; an increase in TKW may be caused by an increased seed size, an increased seed weight, an increased embryo size, and/or an increased endosperm); or other parameters allowing to measure seed yield. Seed yield may be determined on a dry weight or on a fresh weight basis, or typically on a moisture adjusted basis, e.g. at 15.5 percent moisture.
In further preferred embodiments, yield refers to the specific content and/or composition of a harvestable product, including, without limitation, an enhanced and/or improved sugar content or sugar composition, an enhanced or improved starch content and/or starch composition, an enhanced and/or improved oil content and/or oil composition (such as enhanced seed oil content), an enhanced or improved protein content and/or protein composition (such as enhanced seed protein content), an enhanced and/or improved vitamin content and/or vitamin composition, or the like.
In a preferred meaning according to the present application, “yield” as described herein may also refer to the harvestable yield of a plant, which largely depends on the specific plant/crop of interest as well as its intended application (such as food production, feed production, processed food production, biofuel, biogas or alcohol production, or the like) of interest in each particular case. Thus, yield may also be calculated as harvest index (expressed as a ratio of the weight of the respective harvestable parts divided by the total biomass), harvestable parts weight per area (acre, squaremeter, or the like); and the like.
Preferably, the preferred enhanced or improved yield characteristics of a plant described herein according to the present invention can be achieved in the absence or presence of stress conditions.
The meaning of “yield” is, thus, mainly dependent on the crop of interest and the intended application, and it is understood, that the skilled person will understand in each particular case what is meant from the circumstances of the description.

[0062] In one embodiment this invention fulfills in part the need to identify new, unique genes capable of conferring increased yield, preferably under condition of transient and repetitive abiotic stress to plants upon expression or over-expression of endogenous and/or exogenous genes.

[0063] In a further embodiment of the present invention, yield-related trait may also be increased salinity tolerance (salt tolerance), tolerance to osmotic stress, increased shade tolerance, increased tolerance to a high plant density, increased tolerance to mechanical stresses, and/or increased tolerance to oxidative stress.

In an embodiment thereof, the term “enhanced tolerance to abiotic environmental stress” in a photosynthetic active organism means that the photosynthetic active organism, preferably a plant, when confronted with abiotic environmental stress conditions exhibits an enhanced dry biomass yield as compared to a corresponding, e.g. non-transformed, wild type photosynthetic active organism like a plant.
In an embodiment thereof, the term “enhanced tolerance to abiotic environmental stress” in a photosynthetic active organism means that the photosynthetic active organism, preferably a plant, when confronted with abiotic environmental stress conditions exhibits an enhanced aerial dry biomass yield as compared to a corresponding, e.g. non-transformed, wild type photosynthetic active organism.
In an embodiment thereof, the term “enhanced tolerance to abiotic environmental stress” in a plant means that the plant, when confronted with abiotic environmental stress conditions exhibits an enhanced underground dry biomass yield as compared to a corresponding, e.g. non-transformed, wild type organism.
In another embodiment thereof, the term “enhanced tolerance to abiotic environmental stress” in a plant means that the plant, when confronted with abiotic environmental stress conditions exhibits an enhanced fresh weight biomass yield as compared to a corresponding, e.g. non-transformed, wild type organism.
In an embodiment thereof, the term “enhanced tolerance to abiotic environmental stress” in a plant means that the plant, when confronted with abiotic environmental stress conditions exhibits an enhanced aerial fresh weight biomass yield as compared to a corresponding, e.g. non-transformed, wild type organism.
In an embodiment thereof, the term “enhanced tolerance to abiotic environmental stress” in a plant means that the plant, when confronted with abiotic environmental stress conditions exhibits an enhanced underground fresh weight biomass yield as compared to a corresponding, e.g. non-transformed, wild type organism.
In another embodiment thereof, the term “enhanced tolerance to abiotic environmental stress” in a plant means that the plant, when confronted with abiotic environmental stress conditions exhibits an enhanced yield of harvestable parts of a plant as compared to a corresponding, e.g. non-transformed, wild type organism.
In an embodiment thereof, the term “enhanced tolerance to abiotic environmental stress” in a plant means that the plant, when confronted with abiotic environmental stress conditions exhibits an enhanced yield of dry harvestable parts of a plant as compared to a corresponding, e.g. non-transformed, wild type organism.
In an embodiment thereof, the term “enhanced tolerance to abiotic environmental stress” in a plant means that the plant, when confronted with abiotic environmental stress conditions exhibits an enhanced yield of dry aerial harvestable parts of a plant as compared to a corresponding, e.g. non-transformed, wild type organism.
In an embodiment thereof, the term “enhanced tolerance to abiotic environmental stress” in a plant means that the plant, when confronted with abiotic environmental stress conditions exhibits an enhanced yield of underground dry harvestable parts of a plant as compared to a corresponding, e.g. non-transformed, wild type organism.
In another embodiment thereof, the term “enhanced tolerance to abiotic environmental stress” in a plant means that the plant, when confronted with abiotic environmental stress conditions exhibits an enhanced yield of fresh weight harvestable parts of a plant as compared to a corresponding, e.g. non-transformed, wild type organism.
In an embodiment thereof, the term “enhanced tolerance to abiotic environmental stress” in a plant means that the plant, when confronted with abiotic environmental stress conditions an enhanced yield of aerial fresh weight harvestable parts of a plant as compared to a corresponding, e.g. non-transformed, wild type organism.
In an embodiment thereof, the term “enhanced tolerance to abiotic environmental stress” in a plant means that the plant, when confronted with abiotic environmental stress conditions exhibits an enhanced yield of underground fresh weight harvestable parts of a plant as compared to a corresponding, e.g. non-transformed, wild type organism.
In a further embodiment, the term “enhanced tolerance to abiotic environmental stress” in a plant means that the plant, when confronted with abiotic environmental stress conditions exhibits an enhanced yield of the crop fruit as compared to a corresponding, e.g. non-transformed, wild type organism.
In an embodiment thereof, the term “enhanced tolerance to abiotic environmental stress” in a plant means that the plant, when confronted with abiotic environmental stress conditions exhibits an enhanced yield of the fresh crop fruit as compared to a corresponding, e.g. non-transformed, wild type organism.
In an embodiment thereof, the term “enhanced tolerance to abiotic environmental stress” in a plant means that the plant, when confronted with abiotic environmental stress conditions exhibits an enhanced yield of the dry crop fruit as compared to a corresponding, e.g. non-transformed, wild type organism.
In an embodiment thereof, the term “enhanced tolerance to abiotic environmental stress” in a plant means that the plant, when confronted with abiotic environmental stress conditions exhibits an enhanced grain dry weight as compared to a corresponding, e.g. non-transformed, wild type organism.
In a further embodiment, the term “enhanced tolerance to abiotic environmental stress” in a plant means that the plant, when confronted with abiotic environmental stress conditions exhibits an enhanced yield of seeds as compared to a corresponding, e.g. non-transformed, wild type organism.
In an embodiment thereof, the term “enhanced tolerance to abiotic environmental stress” in a plant means that the plant, when confronted with abiotic environmental stress conditions exhibits an enhanced yield of fresh weight seeds as compared to a corresponding, e.g. non-transformed, wild type organism.
In an embodiment thereof, the term “enhanced tolerance to abiotic environmental stress” in a plant means that the plant, when confronted with abiotic environmental stress conditions exhibits an enhanced yield of dry seeds as compared to a corresponding, e.g. non-transformed, wild type organism.
For example, the abiotic environmental stress conditions, the plant is confronted with, can, however, be any of the abiotic environmental stresses mentioned herein. Preferably, the is a plant, as described herein. A plant produced according to the present invention can be a crop plant, e.g. corn, soy bean, rice, cotton, wheat or oil seed rape (for example, canola) or as listed below.
An increased nitrogen use efficiency of the produced corn relates in one embodiment to an improved or increased protein content of the corn seed, in particular in corn seed used as feed. Increased nitrogen use efficiency relates in another embodiment to an increased kernel size or a higher kernel number per plant. An increased water use efficiency of the produced corn relates in one embodiment to an increased kernel size or number compared to a wild type plant. Further, an increased tolerance to low temperature relates in one embodiment to an early vigor and allows the early planting and sowing of a corn plant produced according to the method of the present invention.
A increased nitrogen use efficiency of the produced soy plant relates in one embodiment to an improved or increased protein content of the soy seed, in particular in soy seed used as feed. Increased nitrogen use efficiency relates in another embodiment to an increased kernel size or number. An increased water use efficiency of the produced soy plant relates in one embodiment to an increased kernel size or number. Further, an increased tolerance to low temperature relates in one embodiment to an early vigor and allows the early planting and sowing of a soy plant produced according to the method of the present invention.
An increased nitrogen use efficiency of the produced OSR plant relates in one embodiment to an improved or increased protein content of the OSR seed, in particular in OSR seed used as feed. Increased nitrogen use efficiency relates in another embodiment to an increased kernel size or number per plant. An increased water use efficiency of the produced OSR plant relates in one embodiment to an increased kernel size or number per plant. Further, an increased tolerance to low temperature relates in one embodiment to an early vigor and allows the early planting and sowing of a OSR plant produced according to the method of the present invention. In one embodiment, the present invention relates to a method for the production of hardy oil seed rape (OSR with winter hardness) comprising using a hardy oil seed rape plant in the above mentioned method of the invention.
A increased nitrogen use efficiency of the produced cotton plant relates in one embodiment to an improved protein content of the cotton seed, in particular in cotton seed used for feeding. Increased nitrogen use efficiency relates in another embodiment to an increased kernel size or number. An increased water use efficiency of the produced cotton plant relates in one embodiment to an increased kernel size or number. Further, an increased tolerance to low temperature relates in one embodiment to an early vigor and allows the early planting and sowing of a soy plant produced according to the method of the present invention.
Accordingly, the present invention provides a method for producing a transgenic plant with increased yield showing one or more improved yield-related traits as compared to the corresponding origin or the wild type plant, whereby the method comprises the increasing or generating of one or more activities selected from the group consisting of phosphoenolpyruvate carboxylkinase, arginine/alanine aminopeptidase, D-alanyl-D-alanine carboxypeptidase, diacylglycerol pyrophosphate phosphatase, dityrosine transporter, farnesyl-diphosphate farnesyl transferase, NAD+-dependent betaine aldehyde dehydrogenase, serine hydrolase, transcriptional regulator involved in conferring resistance to ketoconazole, uridine kinase, yal043c-a-protein, ybr071w-protein, and ydr445c-protein in the subcellular compartment and/or tissue of said plant as indicated herein, e.g. in Table I.

[0064] Accordingly, the present invention relates to a method for producing a transgenic plant cell, a plant or a part thereof with increased yield, e.g. an increased yield-related trait, for example enhanced tolerance to abiotic environmental stress, for example an increased drought tolerance and/or low temperature tolerance and/or an increased nutrient use efficiency, intrinsic yield and/or another mentioned yield-related trait, preferably under condition of transient and repetitive abiotic stress as compared to a corresponding non-transformed wild type plant cell, a plant or a part thereof, which comprises
[0065] (a) increasing or generating one or more activities selected from the group consisting of: phosphoenolpyruvate carboxylkinase, arginine/alanine aminopeptidase, D-alanyl-D-alanine carboxypeptidase, diacylglycerol pyrophosphate phosphatase, dityrosine transporter, farnesyl-diphosphate farnesyl transferase, NAD+-dependent betaine aldehyde dehydrogenase, serine hydrolase, transcriptional regulator involved in conferring resistance to ketoconazole, uridine kinase, yal043c-a-protein, ybr071w-protein, and ydr445c-protein in plant cell, a plant or a part thereof,
   and
[0066] (b) growing the plant cell, a plant or a part thereof under conditions which permit the development of a plant with increased yield, e.g. an increased yield-related trait, for example enhanced tolerance to abiotic environmental stress, for example an increased drought tolerance and/or low temperature tolerance and/or an increased nutrient use efficiency, intrinsic yield and/or another mentioned yield related trait, preferably under condition of transient and repetitive abiotic stressas compared to a corresponding non-transformed wild type plant.

[0067] In a preferred embodiment the present invention relates to a method for producing a transgenic plant cell, a plant or a part thereof with increased yield, e.g. an increased yield-related trait, for example enhanced tolerance to abiotic environmental stress, for example an increased drought tolerance and/or low temperature tolerance and/or an increased nutrient use efficiency, intrinsic yield and/or another mentioned yield-related trait, preferably under condition of transient and repetitive abiotic stress as compared to a corresponding non-transformed wild type plant cell, a plant or a part thereof, which comprises
[0068] (a) increasing or generating one or more activities selected from the group consisting of: phosphoenolpyruvate carboxylkinase, arginine/alanine aminopeptidase, D-alanyl-D-alanine carboxypeptidase, diacylglycerol pyrophosphate phosphatase, dityrosine transporter, farnesyl-diphosphate farnesyl transferase, NAD+-dependent betaine aldehyde dehydrogenase, serine hydrolase, transcriptional regulator involved in conferring resistance to ketoconazole, uridine kinase, yal043c-a-protein, ybr071w-protein, and ydr445c-protein in plant cell, a plant or a part thereof,
   and
[0069] (b) growing the plant cell, a plant or a part thereof together with non-transformed wildtype plants
[0070] c) imposing of transient and repetitive abiotic stress by preferably withholding repeated watering,
[0071] d) after the non-transformed wild type plants show visual symptoms of injury selecting the plant with increased yield, e.g. an increased yield-related trait, for example enhanced tolerance to abiotic environmental stress, for example an increased drought tolerance and/or low temperature tolerance and/or an increased nutrient use efficiency, intrinsic yield and/or another mentioned yield-related trait, preferably under condition of transient and repetitive abiotic stress as compared to a corresponding non-transformed wild type plant.
   In one embodiment of the invention the increased resistance to transient and repetitive abiotic stress is determinated and quantified according to the following method:
   Transformed plants are grown in pots in a growth chamber (e.g. York, Mannheim, Germany). In case the plants are Arabidopsis thaliana soil is prepared as 1:1 (v/v) mixture of nutrient rich soil (GS90, Tantau, Wansdorf, Germany) and quarz sand. Pots (6 cm diameter) are filled with this mixture and placed into trays. Water is added to the trays to let the soil mixture take up appropriate amount of water for the sowing procedure (day 1) and subsequently seeds of transgenic A. thaliana plants and their wild-type controls are sown in pots. Then the filled tray is covered with a transparent lid and transferred into a precooled (4° C.-5° C.) and darkened growth chamber. Stratification is established for a period of 3 days in the dark at 4° C.-5° C. or, alternatively, for 4 days in the dark at 4° C. Germination of seeds and growth is initiated at a growth condition of 20° C., 60% relative humidity, 16 h photoperiod and illumination with fluorescent light at 200 μmol/m2s or, alternatively at 220 μmol/m2s. Covers are removed 7-8 days after sowing. BASTA selection can be done at day 10 or day 11 (9 or 10 days after sowing) by spraying pots with plantlets from the top. In the standard experiment, a 0.07% (v/v) solution of BASTA concentrate (183 g/l glufosinate-ammonium) in tap water is sprayed once or, alternatively, a 0.02% (v/v) solution of BASTA is sprayed three times. The wild-type control plants are sprayed with tap water only (instead of spraying with BASTA dissolved in tap water) but are otherwise treated identically. Plants are individualized 13-14 days after sowing by removing the surplus of seedlings and leaving one seedling in soil. Transgenic events and wild-type control plants are evenly distributed over the chamber.

[0072] The water supply throughout the experiment is limited and plants are subjected to cycles of drought and re-watering. Watering is carried out at day 1 (before sowing), day 14 or day 15, day 21 or day 22, and, finally, day 27 or day 28.

[0073] Visual symptoms of injury stating for one or any combination of two, three or more of the following features:

a) wilting
b) leaf browning
c) loss of turgor, which results in drooping of leaves or needles stems, and flowers,
d) drooping and/or shedding of leaves or needles,
e) the leaves are green but leaf angled slightly toward the ground compared with controls,
f) leaf blades begun to fold (curl) inward,
g) premature senescence of leaves or needles,
h) loss of chlorophyll in leaves or needles and/or yellowing.

[0074] In one embodiment the present invention relates to a method for producing a transgenic plant cell, a plant or a part thereof with increased yield, e.g. an increased yield-related trait, for example enhanced tolerance to abiotic environmental stress, for example an increased drought tolerance and/or low temperature tolerance and/or an increased nutrient use efficiency, intrinsic yield and/or another mentioned yield-related trait, preferably under condition of transient and repetitive abiotic stress as compared to a corresponding non-transformed wild type plant cell, a plant or a part thereof, which comprises
[0075] (a) increasing or generating the activity of a protein as shown in table II, column 3 encoded by the nucleic acid sequences as shown in table I, column 5, in plant cell, a plant or a part thereof,
   and
[0076] (b) growing the plant cell, a plant or a part thereof under conditions which permit the development of a plant with increased yield, preferably under condition of transient and repetitive abiotic stressas compared to a corresponding non-transformed wild type plant.

[0077] Accordingly, the present invention relates to a method for producing a transgenic plant cell, a plant or a part thereof with increased yield, e.g. an increased yield-related trait, for example enhanced tolerance to abiotic environmental stress, for example an increased drought tolerance and/or low temperature tolerance and/or an increased nutrient use efficiency, intrinsic yield and/or another mentioned yield-related trait, preferably under condition of transient and repetitive abiotic stress as compared to a corresponding non-transformed wild type plant cell, a plant or a part thereof, which comprises
[0078] (a) increasing or generating one or more activities selected from the group consisting of: phosphoenolpyruvate carboxylkinase, arginine/alanine aminopeptidase, D-alanyl-D-alanine carboxypeptidase, diacylglycerol pyrophosphate phosphatase, dityrosine transporter, farnesyl-diphosphate farnesyl transferase, NAD+-dependent betaine aldehyde dehydrogenase, serine hydrolase, transcriptional regulator involved in conferring resistance to ketoconazole, uridine kinase, yal043c-a-protein, ybr071w-protein, and ydr445c-protein in the plastid of a plant cell,
   and
[0079] (b) growing the plant cell under conditions which permit the development of a plant with increased yield, e.g. an increased yield-related trait, for example enhanced tolerance to abiotic environmental stress, for example an increased drought tolerance and/or low temperature tolerance and/or an increased nutrient use efficiency, intrinsic yield and/or another mentioned yield-related trait, preferably under condition of transient and repetitive abiotic stressas compared to a corresponding non-transformed wild type plant.

[0080] In one embodiment the present invention relates to a method for producing a transgenic plant cell, a plant or a part thereof with increased yield, e.g. an increased yield-related trait, for example enhanced tolerance to abiotic environmental stress, for example an increased drought tolerance and/or low temperature tolerance and/or an increased nutrient use efficiency, intrinsic yield and/or another mentioned yield-related trait, preferably under condition of transient and repetitive abiotic stress as compared to a corresponding non-transformed wild type plant cell, a plant or a part thereof, which comprises
[0081] (a) increasing or generating the activity of a protein as shown in table II, column 3 encoded by the nucleic acid sequences as shown in table I, column 5 or 7, in the plastid of a plant cell,
   and
[0082] (b) growing the plant cell under conditions which permit the development of a plant with increased yield, e.g. an increased yield-related trait, for example enhanced tolerance to abiotic environmental stress, for example an increased drought tolerance and/or low temperature tolerance and/or an increased nutrient use efficiency, intrinsic yield and/or another mentioned yield-related trait, preferably under condition of transient and repetitive abiotic stressas compared to a corresponding non-transformed wild type plant.

[0083] In another embodiment the present invention is related to a method for producing a transgenic plant cell, a plant or a part thereof with increased yield, e.g. an increased yield-related trait, for example enhanced tolerance to abiotic environmental stress, for example an increased drought tolerance and/or low temperature tolerance and/or an increased nutrient use efficiency, intrinsic yield and/or another mentioned yield-related trait, preferably under condition of transient and repetitive abiotic stress as compared to a corresponding non-transformed wild type plant cell, a plant or a part thereof, which comprises

(a) increasing or generating one or more activities selected from the group consisting of: phosphoenolpyruvate carboxylkinase, arginine/alanine aminopeptidase, D-alanyl-D-alanine carboxypeptidase, diacylglycerol pyrophosphate phosphatase, dityrosine transporter, farnesyl-diphosphate farnesyl transferase, NAD+-dependent betaine aldehyde dehydrogenase, serine hydrolase, transcriptional regulator involved in conferring resistance to ketoconazole, uridine kinase, yal043c-a-protein, ybr071w-protein, and ydr445c-protein in an organelle of a plant cell or
(b) increasing or generating the activity of a protein as shown in table II, column 3 encoded by the nucleic acid sequences as shown in table I, column 5 or 7, which are joined to a nucleic acid sequence encoding a transit peptide in a plant cell; or
(c) increasing or generating the activity of a protein as shown in table II, column 3 encoded by the nucleic acid sequences as shown in table I, column 5 or 7, which are joined to a nucleic acid sequence encoding chloroplast localization sequence, in a plant cell, and
(d) growing the plant cell under conditions which permit the development of a plant with increased yield, e.g. an increased yield-related trait, for example enhanced tolerance to abiotic environmental stress, for example an increased drought tolerance and/or low temperature tolerance and/or an increased nutrient use efficiency, intrinsic yield and/or another mentioned yield-related trait, preferably under condition of transient and repetitive abiotic stress as compared to a corresponding non-transformed wild type plant.

[0084] In another embodiment, the present invention relates to a method for producing a transgenic plant cell, a plant or a part thereof with increased yield, e.g. an increased yield-related trait, for example enhanced tolerance to abiotic environmental stress, for example an increased drought tolerance and/or low temperature tolerance and/or an increased nutrient use efficiency, intrinsic yield and/or another mentioned yield-related trait, preferably under condition of transient and repetitive abiotic stress as compared to a corresponding non-transformed wild type plant cell, a plant or a part thereof, which comprises

(a) increasing or generating the activity of a protein as shown in table II, column 3 encoded by the nucleic acid sequences as shown in table I, column 5 or 7, in an organelle of a plant through the transformation of the organelle, or
(b) increasing or generating the activity of a protein as shown in table II, column 3 encoded by the nucleic acid sequences as shown in table I, column 5 or 7 in the plastid of a plant, or in one or more parts thereof through the transformation of the plastids; and
(c) growing the plant cell under conditions which permit the development of a plant with increased yield, e.g. an increased yield-related trait, for example enhanced tolerance to abiotic environmental stress, for example an increased drought tolerance and/or low temperature tolerance and/or an increased nutrient use efficiency, intrinsic yield and/or another mentioned yield-related trait, preferably under condition of transient and repetitive abiotic stress as compared to a corresponding non-transformed wild type plant.

[0085] Accordingly, in preferred embodiments, the present invention provides a method for producing a transgenic plant cell nucleus; a transgenic plant cell; plant(s) comprising one or more of such transgenic nuclei or plant cell(s); progeny, seed, and/or pollen derived from such plant cell and/or transgenic plant(s); each showing increased yield as compared to a corresponding non-transformed wild type plant cell or plant, by increasing or generating one or more activities selected from the group consisting of phosphoenolpyruvate carboxylkinase, arginine/alanine aminopeptidase,

[0086] D-alanyl-D-alanine carboxypeptidase, diacylglycerol pyrophosphate phosphatase, dityrosine transporter, farnesyl-diphosphate farnesyl transferase, NAD+-dependent betaine aldehyde dehydrogenase, serine hydrolase, transcriptional regulator involved in conferring resistance to ketoconazole, uridine kinase, yal043c-a-protein, ybr071w-protein, and ydr445c-protein.

[0087] Furthermore, the present invention provides a transgenic plant cell nucleus; a trans-genic plant cell; plant(s) comprising one or more of such transgenic nuclei or plant cell(s); progeny, seed, and/or pollen derived from such plant cell and/or transgenic plant(s); each showing increased yield as compared to a corresponding non-transformed wild type plant cell or plant, by increasing or generating one or more activities selected from the group consisting of phosphoenolpyruvate carboxylkinase, arginine/alanine aminopeptidase, D-alanyl-D-alanine carboxypeptidase, diacylglycerol pyrophosphate phosphatase, dityrosine transporter, farnesyl-diphosphate farnesyl transferase, NAD+-dependent betaine aldehyde dehydrogenase, serine hydrolase, transcriptional regulator involved in conferring resistance to ketoconazole, uridine kinase, yal043c-a-protein, ybr071w-protein, and ydr445c-protein.

[0088] In principle the nucleic acid sequence encoding a transit peptide can be isolated from every organism such as microorganisms such as algae or plants containing plastids preferably chloroplasts. A “transit peptide” is an amino acid sequence, whose encoding nucleic acid sequence is translated together with the corresponding structural gene. That means the transit peptide is an integral part of the translated protein and forms an amino terminal extension of the protein. Both are translated as so called “preprotein”. In general the transit peptide is cleaved off from the preprotein during or just after import of the protein into the correct cell organelle such as a plastid to yield the mature protein. The transit peptide ensures correct localization of the mature protein by facilitating the transport of proteins through intracellular membranes. Preferred nucleic acid sequences encoding a transit peptide are derived from a nucleic acid sequence encoding a protein finally resided in the plastid and stemming from an organism selected from the group consisting of the genera

[0089] Acetabularia, Arabidopsis, Brassica, Capsicum, Chlamydomonas, Cururbita, Dunaliella, Euglena, Flaveria, Glycine, Helianthus, Hordeum, Lemna, Lolium, Lycopersion, Malus, Medicago, Mesembryanthemum, Nicotiana, Oenotherea, Oryza, Petunia, Phaseolus, Physcomitrella, Pinus, Pisum, Raphanus, Silene, Sinapis, Solanum, Spinacea, Stevia, Synechococcus, Triticum and Zea.

[0090] Advantageously such transit peptides, which are beneficially used in the inventive process, are derived from the nucleic acid sequence encoding a protein selected from the group consisting of

[0091] ribulose bisphosphate carboxylase/oxygenase, 5-enolpyruvylshikimate-3-phosphate synthase, acetolactate synthase, chloroplast ribosomal protein CS17, Cs protein, ferredoxin, plastocyanin, ribulose bisphosphate activase, tryptophan synthase, acyl carrier protein, plastid chaperonin-60, cytochrome c₅₅₂, 22-kDA heat shock protein, 33-kDa Oxygen-evolving enhancer protein 1, ATP synthase γ subunit, ATP synthase δ subunit, chlorophyll-a/b-binding proteinII-1, Oxygen-evolving enhancer protein 2, Oxygen-evolving enhancer protein 3, photosystem I: P21, photosystem I: P28, photosystem I: P30, photosystem I: P35, photosystem I: P37, glycerol-3-phosphate acyltransferases, chlorophyll a/b binding protein, CAB2 protein, hydroxymethyl-bilane synthase, pyruvate-orthophosphate dikinase, CAB3 protein, plastid ferritin, ferritin, early light-inducible protein, glutamate-1-semialdehyde aminotransferase, protochlorophyllide reductase, starch-granule-bound amylase synthase, light-harvesting chlorophyll a/b-binding protein of photosystem II, major pollen allergen Lol p 5a, plastid CIpB ATP-dependent protease, superoxide dismutase, ferredoxin NADP oxidoreductase, 28-kDa ribonucleoprotein, 31-kDa ribonucleoprotein, 33-kDa ribonucleoprotein, acetolactate synthase, ATP synthase CF₀ subunit 1, ATP synthase CF₀ subunit 2, ATP synthase CF subunit 3, ATP synthase CF subunit 4, cytochrome f, ADP-glucose pyrophosphorylase, glutamine synthase, glutamine synthase 2, carbonic anhydrase, GapA protein, heat-shock-protein hsp21, phosphate translocator, plastid CIpA ATP-dependent protease, plastid ribosomal protein CL24, plastid ribosomal protein CL9, plastid ribosomal protein PsCL18, plastid ribosomal protein PsCL25, DAHP synthase, starch phosphorylase, root acyl carrier protein II, betaine-aldehyde dehydrogenase, GapB protein, glutamine synthetase 2, phosphoribulokinase, nitrite reductase, ribosomal protein L12, ribosomal protein L13, ribosomal protein L21, ribosomal protein L35, ribosomal protein L40, triose phosphate-3-phosphoglyerate-phosphate translocator, ferredoxin-dependent glutamate synthase, glyceraldehyde-3-phosphate dehydrogenase, NADP-dependent malic enzyme and NADP-malate dehydrogenase.

[0092] More preferred the nucleic acid sequence encoding a transit peptide is derived from a nucleic acid sequence encoding a protein finally resided in the plastid and stemming from an organism selected from the group consisting of the species:

[0093] Acetabularia mediterranea, Arabidopsis thaliana, Brassica campestris, Brassica napus, Capsicum annuum, Chlamydomonas reinhardtii, Cururbita moschata, Dunaliella salina, Dunaliella tertiolecta, Euglena gracilis, Flaveria trinervia, Glycine max, Helianthus annuus, Hordeum vulgare, Lemna gibba, Lolium perenne, Lycopersion esculentum, Malus domestica, Medicago falcata, Medicago sativa, Mesembryanthemum crystallinum, Nicotiana plumbaginifolia, Nicotiana sylvestris, Nicotiana tabacum, Oenotherea hookeri, Oryza sativa, Petunia hybrida, Phaseolus vulgaris, Physcomitrella patens, Pinus tunbergii, Pisum sativum, Raphanus sativus, Silene pratensis, Sinapis alba, Solanum tuberosum, Spinacea oleracea, Stevia rebaudiana, Synechococcus, Synechocystis, Triticum aestivum and Zea mays.

[0094] Even more preferred nucleic acid sequences are encoding transit peptides as disclosed by von Heijne et al. [Plant Molecular Biology Reporter, Vol. 9 (2), 1991: 104-126], which are hereby incorporated by reference. Table V shows some examples of the transit peptide sequences disclosed by von Heijne et al. According to the disclosure of the invention especially in the examples the skilled worker is able to link other nucleic acid sequences disclosed by von Heijne et al. to the nucleic acid sequences shown in table I, columns 5 and 7. Most preferred nucleic acid sequences encoding transit peptides are derived from the genus Spinacia such as chloroplast 30S ribosomal protein PSrp-1, root acyl carrier protein II, acyl carrier protein, ATP synthase: γ subunit, ATP synthase: δ subunit, cytochrome f, ferredoxin I, ferredoxin NADP oxidoreductase (═FNR), nitrite reductase, phosphoribulokinase, plastocyanin or carbonic anhydrase. The skilled worker will recognize that various other nucleic acid sequences encoding transit peptides can easely isolated from plastid-localized proteins, which are expressed from nuclear genes as precursors and are then targeted to plastids. Such transit peptides encoding sequences can be used for the construction of other expression constructs. The transit peptides advantageously used in the inventive process and which are part of the inventive nucleic acid sequences and proteins are typically 20 to 120 amino acids, preferably 25 to 110, 30 to 100 or 35 to 90 amino acids, more preferably 40 to 85 amino acids and most preferably 45 to 80 amino acids in length and functions post-translationally to direct the protein to the plastid preferably to the chloroplast. The nucleic acid sequences encoding such transit peptides are localized upstream of nucleic acid sequence encoding the mature protein. For the correct molecular joining of the transit peptide encoding nucleic acid and the nucleic acid encoding the protein to be targeted it is sometimes necessary to introduce additional base pairs at the joining position, which forms restriction enzyme recognition sequences useful for the molecular joining of the different nucleic acid molecules. This procedure might lead to very few additional amino acids at the N-terminal of the mature imported protein, which usually and preferably do not interfere with the protein function. In any case, the additional base pairs at the joining position which forms restriction enzyme recognition sequences have to be chosen with care, in order to avoid the formation of stop codons or codons which encode amino acids with a strong influence on protein folding, like e.g. proline. It is preferred that such additional codons encode small structural flexible amino acids such as glycine or alanine.

[0095] As mentioned above the nucleic acid sequences coding for the proteins as shown in table II, column 3 and its homologs as disclosed in table I, columns 5 and 7 can be joined to a nucleic acid sequence encoding a transit peptide. This nucleic acid sequence encoding a transit peptide ensures transport of the protein to the plastid. The nucleic acid sequence of the gene to be expressed and the nucleic acid sequence encoding the transit peptide are operably linked. Therefore the transit peptide is fused in frame to the nucleic acid sequence coding for proteins as shown in table II, column 3 and its homologs as disclosed in table I, columns 5 and 7.

[0096] The term “organelle” according to the invention shall mean for example “mitochondria” or preferably “plastid” (throughout the specification the “plural” shall comprise the “singular” and vice versa). The term “plastid” according to the invention are intended to include various forms of plastids including proplastids, chloroplasts, chromoplasts, gerontoplasts, leucoplasts, amyloplasts, elaioplasts and etioplasts preferably chloroplasts. They all have as a common ancestor the aforementioned proplasts.

[0097] Other transit peptides are disclosed by Schmidt et al. [J. Biol. Chem., Vol. 268, No. 36, 1993: 27447-27457], Della-Cioppa et al. [Plant. Physiol. 84, 1987: 965-968], de Castro Silva Filho et al. [Plant Mol. Biol., 30, 1996: 769-780], Zhao et al. [J. Biol. Chem. Vol. 270, No. 11, 1995: 6081-6087], Römer et al. [Biochem. Biophys. Res. Commun., Vol. 196, No. 3, 1993: 1414-1421], Keegstra et al. [Annu. Rev. Plant Physiol. Plant Mol. Biol., 40, 1989: 471-501], Lubben et al. [Photosynthesis Res., 17, 1988: 173-194] and Lawrence et al. [J. Biol. Chem., Vol. 272, No. 33, 1997: 20357-20363]. A general review about targeting is disclosed by Kermode Allison R. in Critical Reviews in Plant Science 15 (4): 285-423 (1996) under the title “Mechanisms of Intracellular Protein Transport and Targeting in Plant Cells.”

[0098] Favored transit peptide sequences, which are used in the inventive process and which forms part of the inventive nucleic acid sequences are generally enriched in hydroxylated amino acid residues (serine and threonine), with these two residues generally constituting 20-35% of the total. They often have an amino-terminal region empty of Gly, Pro, and charged residues. Furthermore they have a number of small hydrophobic amino acids such as valine and alanine and generally acidic amino acids are lacking. In addition they generally have a middle region rich in Ser, Thr, Lys and Arg. Overall they have very often a net positive charge.

[0099] Alternatively, nucleic acid sequences coding for the transit peptides may be chemically synthesized either in part or wholly according to structure of transit peptide sequences disclosed in the prior art. Said natural or chemically synthesized sequences can be directly linked to the sequences encoding the mature protein or via a linker nucleic acid sequence, which may be typically less than 500 base pairs, preferably less than 450, 400, 350, 300, 250 or 200 base pairs, more preferably less than 150, 100, 90, 80, 70, 60, 50, 40 or 30 base pairs and most preferably less than 25, 20, 15, 12, 9, 6 or 3 base pairs in length and are in frame to the coding sequence. Furthermore favorable nucleic acid sequences encoding transit peptides may comprise sequences derived from more than one biological and/or chemical source and may include a nucleic acid sequence derived from the amino-terminal region of the mature protein, which in its native state is linked to the transit peptide. In a preferred embodiment of the invention said amino-terminal region of the mature protein is typically less than 150 amino acids, preferably less than 140, 130, 120, 110, 100 or 90 amino acids, more preferably less than 80, 70, 60, 50, 40, 35, 30, 25 or 20 amino acids and most preferably less than 19, 18, 17, 16, 15, 14, 13, 12, 11 or 10 amino acids in length. But even shorter or longer stretches are also possible. In addition target sequences, which facilitate the transport of proteins to other cell compartments such as the vacuole, endoplasmic reticulum, golgi complex, glyoxysomes, peroxisomes or mitochondria may be also part of the inventive nucleic acid sequence. The proteins translated from said inventive nucleic acid sequences are a kind of fusion proteins that means the nucleic acid sequences encoding the transit peptide for example the ones shown in table V, preferably the last one of the table are joint to the nucleic acid sequences shown in table I, columns 5 and 7. The person skilled in the art is able to join said sequences in a functional manner. Advantageously the transit peptide part is cleaved off from the protein part shown in table II, columns 5 and 7 during the transport preferably into the plastids. All products of the cleavage of the preferred transit peptide shown in the last line of table V have preferably the N-terminal amino acid sequences QIA CSS or QIA EFQLTT in front of the start methionine of the protein mentioned in table II, columns 5 and 7. Other short amino acid sequences of an range of 1 to 20 amino acids preferable 2 to 15 amino acids, more preferable 3 to 10 amino acids most preferably 4 to 8 amino acids are also possible in front of the start methionine of the protein mentioned in table II, columns 5 and 7. In case of the amino acid sequence QIA CSS the three amino acids in front of the start methionine are stemming from the LIC (=ligatation independent cloning) cassette. Said short amino acid sequence is preferred in the case of the expression of E. coli genes. In case of the amino acid sequence QIA EFQLTT the six amino acids in front of the start methionine are stemming from the LIC cassette. Said short amino acid sequence is preferred in the case of the expression of S. cerevisiae genes. The skilled worker knows that other short sequences are also useful in the expression of the genes mentioned in table I, columns 5 and 7. Furthermore the skilled worker is aware of the fact that there is not a need for such short sequences in the expression of the genes.

TABLE V
Examples of transit peptides disclosed by von Heijne et al.

| Trans | | | SEQ ID | |
|---|---|---|---|---|
| Pep | Organism | Transit Peptide | NO: | Reference |
| 1 | Acetabularia | MASIMMNKSVVLSKECAKPLATPK | 10 | Mol. Gen. |
| | mediterranea | VTLNKRGFATTIATKNREMMVWQP | | Genet. |
| | | FNNKMFETFSFLPP | | 218:445- |
| | | | | 452(1989) |
| 2 | Arabidopsis | MAASLQSTATFLQSAKIATAPSRG | 11 | EMBO J. |
| | thaliana | SSHLRSTQAVGKSFGLETSSARLT | | 8:3187- |
| | | CSFQSDFKDFTGKCSDAVKIAGFA | | 3194(1989) |
| | | LATSALVVSGASAEGAPK | | |
| 3 | Arabidopsis | MAQVSRICNGVQNPSLICNLSKSS | 12 | Mol. Gen. |
| | thaliana | QRKSPLSVSLKTQQHPRAYPISSS | | Genet. 210: |
| | | WGLKKSGMTLIGSELRPLKVMSSV | | 437-442 |
| | | STAEKASEIVLQPIREISGLIKLP | | (1987) |
| 4 | Arabidopsis | MAAATTTTTTSSSISFSTKPSPSS | 13 | Plant |
| | thaliana | SKSPLPISRFSLPFSLNPNKSSSS | | Physiol. |
| | | SRRRGIKSSSP SS ISAVLNTTTNV | | 85:1110-1117 |
| | | TTTPSPTKPTKPETF ISRFAPDQP | | (1987) |
| | | RKGA | | |
| 5 | Arabidopsis | MITSSLTCSLQALKLSSPFAHGST | 14 | J. Biol. |
| | thaliana | PLSSLSKPNSFPNHRMPALVPV | | Chem. |
| | | | | 2652763-2767 |
| | | | | (1990) |
| 6 | Arabidopsis | MASLLGTSSSAIWASPSLSSPSSK | 15 | EMBO J. |
| | thaliana | PSSSPICFRPGKLFGSKLNAGIQI | | 9:1337-1346 |
| | | RPKKNRSRYHVSVMNVATEINSTE | | (1990) |
| | | QVVGKFDSKKSARPVYPFAAI | | |
| 7 | Arabidopsis | MASTALSSAIVGTSFIRRSPAPISL | 16 | Plant |
| | thaliana | RSLPSANTQSLFGLKSGTARGG | | Physiol. 93: |
| | | RVVAM | | 572-577 |
| | | | | (1990) |
| 8 | Arabidopsis | MAASTMALSSPAFAGKAVNLSPAA | 17 | Nucl. Acids |
| | thaliana | SEVLGSGRVTNRKTV | | Res. 14: |
| | | | | 4051-4064 |
| | | | | (1986) |
| 9 | Arabidopsis | MAAITSATVTIPSFTGLKLAVSSK | 18 | Gene 65: |
| | thaliana | PKTLSTISRSSSATRAPPKLALKS | | 59-69 |
| | | SLKDFGVIAVATAASIVLAGNAMA | | (1988) |
| | | MEVLLGSDDGSLAFVPSEFT | | |
| 10 | Arabidopsis | MAAAVSTVGAINRAPLSLNGSGSG | 19 | Nucl. Acids |
| | thaliana | AVSAPASTFLGKKVVTVSRFAQSN | | Res. 17: |
| | | KKSNGSFKVLAVKEDKQTDGDRWR | | 2871(1989) |
| | | GLAYDTSDDQIDI | | |
| 11 | Arabidopsis | MkSSMLSSTAWTSPAQATMVAPF | 20 | Plant Mol. |
| | thaliana | TGLKSSASFPVTRKANNDITSITS | | Biol. 11: |
| | | NGGRVSC | | 745-759 |
| | | | | (1988) |
| 12 | Arabidopsis | MAASGTSATFRASVSSAPSSSSQL | 21 | Proc. Natl. |
| | thaliana | THLKSPFKAVKY TPLPS SRSKSSS | | Acad. Sci. |
| | | FSVSCTIAKDPPVLMAAGSDPALW | | USA, 86: |
| | | QRPDSFGRFGKFGGKYVPE | | 4604-4608 |
| | | | | (1989) |
| 13 | Brassica | MSTTFCSSVCMQATSLAATTRISF | 22 | Nucl. Acids |
| | campestris | QKPALVSTTNLSFNLRRSIPTRFS | | Res. 15: |
| | | ISCAAKPETVEKVSKIVKKQLSLK | | 7197(1987) |
| | | DDQKVVAE | | |
| 14 | Brassica napus | MATTFSASVSMQATSLATTTRISF | 23 | Eur. J. Bio- |
| | | QKPVLVSNHGRTNLSFNLSRTRLSI | | chem. 174: |
| | | SC | | 287-295 |
| | | | | (1988) |
| 15 | Chlamydomonas | MQALSSRVNIAAKPQRAQRLVVRA | 24 | Plant Mol. |
| | reinhardtii | EEVKAAPKKEVGPKRGSLVK | | Biol. 12: |
| | | | | 463-474 |
| | | | | (1989) |
| 16 | Cucurbita | MAELIQDKESAQSAATAAAASSGY | 25 | FEBS Lett. |
| | moschata | ERRNEPAHSRKFLEVRSEEELL- | | 238: 424- |
| | | SCIKK | | 430 (1988) |
| 17 | Spinacea | MSTINGCLTSISPSRTQLKNTSTL | 26 | J. Biol. |
| | oleracea | RPTFIANSRVNPSSSVPPSLIRNQ | | Chem. 265: |
| | | PVFAAPAPIITPTL | | 105414-5417 |
| | | | | (1990) |
| 18 | Spinacea | MTTAVTAAVSFPSTKTTSLSARCS | 27 | Curr. |
| | oleracea | SVISPDKISYKKVPLYYRNVSATG | | Genet. 13: |
| | | KMGPIRAQIASDVEAPPPAPAK- | | 517-522 |
| | | VEKMS | | (1988) |
| 19 | Spinacea | MTTAVTAAVSFPSTKTTSLSARSS | 28 | |
| | oleracea | SVISPDKISYKKVPLYYRNVSATG | | |
| | | KMGPIRA | | |

[0100] Alternatively to the targeting of the sequences shown in table II, columns 5 and 7 preferably of sequences in general encoded in the nucleus with the aid of the targeting sequences mentioned for example in table V alone or in combination with other targeting sequences preferably into the plastids, the nucleic acids of the invention can directly be introduced into the plastidal genome. Therefore in a preferred embodiment the nucleic acid sequences shown in table I, columns 5 and 7 are directly introduced and expressed in plastids.

[0101] The term “introduced” in the context of this specification shall mean the insertion of a nucleic acid sequence into the organism by means of a “transfection”, “transduction” or preferably by “transformation”.

[0102] A plastid, such as a chloroplast, has been “transformed” by an exogenous (preferably foreign) nucleic acid sequence if nucleic acid sequence has been introduced into the plastid that means that this sequence has crossed the membrane or the membranes of the plastid. The foreign DNA may be integrated (covalently linked) into plastid DNA making up the genome of the plastid, or it may remain unintegrated (e.g., by including a chloroplast origin of replication). “Stably” integrated DNA sequences are those, which are inherited through plastid replication, thereby transferring new plastids, with the features of the integrated DNA sequence to the progeny.

[0103] For expression a person skilled in the art is familiar with different methods to introduce the nucleic acid sequences into different organelles such as the preferred plastids. Such methods are for example disclosed by Pal Maiga (Annu. Rev. Plant Biol., 2004, 55: 289-313), Thomas Evans (WO 2004/040973), Kevin E. McBride et al. (U.S. Pat. No. 5,455,818), Henry Daniell et al. (U.S. Pat. No. 5,932,479 and U.S. Pat. No. 5,693,507) and Jeffrey M. Straub et al. (U.S. Pat. No. 6,781,033). A preferred method is the transformation of microspore-derived hypocotyl or cotyledonary tissue (which are green and thus contain numerous plastids) leaf tissue and afterwards the regeneration of shoots from said trans-formed plant material on selective medium. As methods for the transformation bombarding of the plant material or the use of independently replicating shuttle vectors are well known by the skilled worker. But also a PEG-mediated transformation of the plastids or Agrobacterium transformation with binary vectors is possible. Useful markers for the transformation of plastids are positive selection markers for example the chloramphenicol-, streptomycin-, kanamycin-, neomycin-, amikamycin-, spectinomycin-, triazine- and/or lincomycin-resistance genes. As additional markers named in the literature often as secondary markers, genes coding for the resistance against herbicides such as phosphinothricin (=glufosinate, BASTA™, Liberty™, encoded by the bar gene), glyphosate (═N-(phosphonomethyl)glycine, Roundup Ready™, encoded by the 5-enolpyruvylshikimate-3-phosphate synthase gene=epsps), sulfonylurea (=Staple™, encoded by the acetolactate synthase gene), imidazolinone [=IMI, imazethapyr, imazamox, Clearfield™, encoded by the acetohydroxyacid synthase (AHAS) gene, also known as acetolactate synthase (ALS) gene] or bromoxynil (=Buctril™, encoded by the oxy gene) or genes coding for antibiotics such as hygromycin or G418 are useful for further selection. Such secondary markers are useful in the case when most genome copies are transformed. In addition negative selection markers such as the bacterial cytosine deaminase (encoded by the codA gene) are also useful for the transformation of plastids.

[0104] To increase the possibility of identification of transformants it is also desirable to use reporter genes other then the aforementioned resistance genes or in addition to said genes. Reporter genes are for example β-galactosidase-, β-glucuronidase- (GUS), alkaline phosphatase- and/or green-fluorescent protein-genes (GFP).

[0105] For the inventive process it is of great advantage that by transforming the plastids the intraspecies specific transgene flow is blocked, because a lot of species such as corn, cotton and rice have a strict maternal inheritance of plastids. By placing the genes specified in table I, columns 5 and 7 or active fragments thereof in the plastids of plants, these genes will not be present in the pollen of said plants. A further preferred embodiment of the invention relates to the use of so called “chloroplast localization sequences”, in which a first RNA sequence or molecule is capable of transporting or “chaperoning” a second RNA sequence, such as a RNA sequence transcribed from the sequences depicted in table I, columns 5 and 7 or a sequence encoding a protein, as depicted in table II, columns 5 and 7, from an external environment inside a cell or outside a plastid into a chloroplast. In one embodiment the chloroplast localization signal is substantially similar or complementary to a complete or intact viroid sequence. The chloroplast localization signal may be encoded by a DNA sequence, which is transcribed into the chloroplast localization RNA. The term “viroid” refers to a naturally occurring single stranded RNA molecule (Flores, C R Acad Sci III. 2001 October; 324(10):943-52). Viroids usually contain about 200-500 nucleotides and generally exist as circular molecules. Examples of viroids that contain chloroplast localization signals include but are not limited to ASBVd, PLMVd, CChMVd and ELVd. The viroid sequence or a functional part of it can be fused to the sequences depicted in table I, columns 5 and 7 or a sequence encoding a protein, as depicted in table II, columns 5 and 7 in such a manner that the viroid sequence transports a sequence transcribed from a sequence as depicted in table I, columns 5 and 7 or a sequence encoding a protein as depicted in table II, columns 5 and 7 into the chloroplasts. A preferred embodiment uses a modified ASBVd (Navarro et al., Virology. 2000 Mar. 1; 268(1):218-25).

[0106] In a further specific embodiment the protein to be expressed in the plastids such as the proteins depicted in table II, columns 5 and 7 are encoded by different nucleic acids. Such a method is disclosed in WO 2004/040973, which shall be incorporated by reference. WO 2004/040973 teaches a method, which relates to the translocation of an RNA corresponding to a gene or gene fragment into the chloroplast by means of a chloroplast localization sequence. The genes, which should be expressed in the plant or plants cells, are split into nucleic acid fragments, which are introduced into different compartments in the plant e.g. the nucleus, the plastids and/or mitochondria. Additionally plant cells are described in which the chloroplast contains a ribozyme fused at one end to an RNA encoding a fragment of a protein used in the inventive process such that the ribozyme can trans-splice the translocated fusion RNA to the RNA encoding the gene fragment to form and as the case may be reunite the nucleic acid fragments to an intact mRNA encoding a functional protein for example as disclosed in table II, columns 5 and 7.

[0107] In a preferred embodiment of the invention the nucleic acid sequences as shown in table I, columns 5 and 7 used in the inventive process are transformed into plastids, which are metabolical active. Those plastids should preferably maintain at a high copy number in the plant or plant tissue of interest, most preferably the chloroplasts found in green plant tissues, such as leaves or cotyledons or in seeds.

[0108] For a good expression in the plastids the nucleic acid sequences as shown in table I, columns 5 and 7 are introduced into an expression cassette using a preferably a promoter and terminator, which are active in plastids preferably a chloroplast promoter. Examples of such promoters include the psbA promoter from the gene from spinach or pea, the rbcL promoter, and the atpB promoter from corn.

[0109] For the purposes of the description of the present invention, the terms “cytoplasmic” and “non-targeted” are exchangeable and shall indicate, that the nucleic acid of the invention is expressed without the addition of an non-natural transit peptide encoding sequence. A non-natural transit peptide encoding sequence is a sequence which is not a natural part of a nucleic acid of the invention, e.g. of the nucleic acids depicted in table I column 5 or 7, but is rather added by molecular manipulation steps as for example described in the example under “plastid targeted expression”. Therefore the terms “cytoplasmic” and “non-targeted” shall not exclude a targeted localisation to any cell compartment for the products of the inventive nucleic acid sequences by their naturally occurring sequence properties within the background of the transgenic organism. The subcellular location of the mature polypeptide derived from the enclosed sequences can be predicted by a skilled person for the organism (plant) by using software tools like TargetP (Emanuelsson et al., (2000), Predicting subcellular localization of proteins based on their N-terminal amino acid sequence., J. Mol. Biol. 300, 1005-1016.), ChloroP (Emanuelsson et al. (1999), ChloroP, a neural network-based method for predicting chloroplast transit peptides and their cleavage sites., Protein Science, 8: 978-984.) or other predictive software tools (Emanuelsson et al. (2007), Locating proteins in the cell using TargetP, SignalP, and related tools., Nature Protocols 2, 953-971).

[0110] Comprises/comprising and grammatical variations thereof when used in this specification are to be taken to specify the presence of stated features, integers, steps or components or groups thereof, but not to preclude the presence or addition of one or more other features, integers, steps, components or groups thereof.

[0111] In accordance with the invention, the term “plant cell” or the term “organism” as understood herein relates always to a plant cell or a organelle thereof, preferably a plastid, more preferably chloroplast.

As used herein, “plant” is meant to include not only a whole plant but also a part thereof i.e., one or more cells, and tissues, including for example, leaves, stems, shoots, roots, flowers, fruits and seeds.

[0112] Surprisingly it was found, that the transgenic expression of the Saccharomyces cerevisiae protein as shown in table II, column 3 and/or the transgenic expression of the E. coli protein as shown in table II, column 3 in a plant such as Arabidopsis thaliana for example, conferred transgenic a plant cell, a plant or a part thereof with increased yield, preferably under condition of transient and repetitive abiotic stressas compared to a corresponding non-transformed wild type plant cell, a plant or a part thereof.

Accordingly, in one embodiment, in case the activity of the Escherichia coli nucleic acid molecule or a polypeptide comprising the nucleic acid SEQ ID NO.: 63 or polypeptide SEQ ID NO.: 64, respectively is increased or generated, e.g. if the activity of a nucleic acid molecule or a polypeptide comprising the nucleic acid or polypeptide or the consensus sequence or the polypeptide motif, as depicted in Table I, II or IV, column 7 in the respective same line as SEQ ID NO.: 63 or SEQ ID NO.: 64, respectively is increased or generated or if the activity “NAD+-dependent betaine aldehyde dehydrogenase” is increased or generated in an plant cell, plant or part thereof an increase in yield, preferably in at least one yield-related trait, preferably in tolerance and/or resistance to environmental stress and an increase biomass production as compared to a corresponding non-transformed wild type plant cell, a plant or a part thereof is conferred. Preferably, the increase occurs plastidic.
Accordingly, in one embodiment, in case the activity of the Escherichia coli nucleic acid molecule or a polypeptide comprising the nucleic acid SEQ ID NO.: 623 or polypeptide SEQ ID NO.: 624, respectively is increased or generated, e.g. if the activity of a nucleic acid molecule or a polypeptide comprising the nucleic acid or polypeptide or the consensus sequence or the polypeptide motif, as depicted in Table I, II or IV, column 7 in the respective same line as SEQ ID NO.: 623 or SEQ ID NO.: 624, respectively is increased or generated or if the activity “D-alanyl-D-alanine carboxypeptidase” is increased or generated in an plant cell, plant or part thereof an increase in yield, preferably in at least one yield-related trait, preferably in tolerance and/or resistance to environmental stress and an increase biomass production as compared to a corresponding non-transformed wild type plant cell, a plant or a part thereof is conferred. Preferably, the increase occurs cytoplasmic.

[0113] Accordingly, in one embodiment, in case the activity of the Saccharomyces cerevisiae nucleic acid molecule or a polypeptide comprising the nucleic acid SEQ ID NO.: 724 or polypeptide SEQ ID NO.: 725, respectively is increased or generated, e.g. if the activity of a nucleic acid molecule or a polypeptide comprising the nucleic acid or polypeptide or the consensus sequence or the polypeptide motif, as depicted in Table I, II or IV, column 7 in the respective same line as SEQ ID NO.: 724 or SEQ ID NO.: 725, respectively is increased or generated or if the activity “yal043c-a-protein” is increased or generated in an plant cell, plant or part thereof an increase in yield, preferably in at least one yield-related trait, preferably in tolerance and/or resistance to environmental stress and an increase biomass production as compared to a corresponding non-transformed wild type plant cell, a plant or a part thereof is conferred. Preferably, the increase occurs cytoplasmic.

[0114] Accordingly, in one embodiment, in case the activity of the Saccharomyces cerevisiae nucleic acid molecule or a polypeptide comprising the nucleic acid SEQ ID NO.: 728 or polypeptide SEQ ID NO.: 729, respectively is increased or generated, e.g. if the activity of a nucleic acid molecule or a polypeptide comprising the nucleic acid or polypeptide or the consensus sequence or the polypeptide motif, as depicted in Table I, II or IV, column 7 in the respective same line as SEQ ID NO.: 728 or SEQ ID NO.: 729, respectively is increased or generated or if the activity “ybr071w-protein” is increased or generated in an plant cell, plant or part thereof an increase in yield, preferably in at least one yield-related trait, preferably in tolerance and/or resistance to environmental stress and an increase biomass production as compared to a corresponding non-transformed wild type plant cell, a plant or a part thereof is conferred. Preferably, the increase occurs plastidic.

Accordingly, in one embodiment, in case the activity of the Saccharomyces cerevisiae nucleic acid molecule or a polypeptide comprising the nucleic acid SEQ ID NO.: 732 or polypeptide SEQ ID NO.: 733, respectively is increased or generated, e.g. if the activity of a nucleic acid molecule or a polypeptide comprising the nucleic acid or polypeptide or the consensus sequence or the polypeptide motif, as depicted in Table I, II or IV, column 7 in the respective same line as SEQ ID NO.: 732 or SEQ ID NO.: 733, respectively is increased or generated or if the activity “dityrosine transporter” is increased or generated in an plant cell, plant or part thereof an increase in yield, preferably in at least one yield-related trait, preferably in tolerance and/or resistance to environmental stress and an increase biomass production as compared to a corresponding non-transformed wild type plant cell, a plant or a part thereof is conferred. Preferably, the increase occurs cytoplasmic.
Accordingly, in one embodiment, in case the activity of the Saccharomyces cerevisiae nucleic acid molecule or a polypeptide comprising the nucleic acid SEQ ID NO.: 764 or polypeptide SEQ ID NO.: 765, respectively is increased or generated, e.g. if the activity of a nucleic acid molecule or a polypeptide comprising the nucleic acid or polypeptide or the consensus sequence or the polypeptide motif, as depicted in Table I, II or IV, column 7 in the respective same line as SEQ ID NO.: 764 or SEQ ID NO.: 765, respectively is increased or generated or if the activity “diacylglycerol pyrophosphate phosphatase” is increased or generated in an plant cell, plant or part thereof an increase in yield, preferably in at least one yield-related trait, preferably in tolerance and/or resistance to environmental stress and an increase biomass production as compared to a corresponding non-transformed wild type plant cell, a plant or a part thereof is conferred. Preferably, the increase occurs cytoplasmic.
Accordingly, in one embodiment, in case the activity of the Saccharomyces cerevisiae nucleic acid molecule or a polypeptide comprising the nucleic acid SEQ ID NO.: 814 or polypeptide SEQ ID NO.: 815, respectively is increased or generated, e.g. if the activity of a nucleic acid molecule or a polypeptide comprising the nucleic acid or polypeptide or the consensus sequence or the polypeptide motif, as depicted in Table I, II or IV, column 7 in the respective same line as SEQ ID NO.: 814 or SEQ ID NO.: 815, respectively is increased or generated or if the activity “ydr445c-protein” is increased or generated in an plant cell, plant or part thereof an increase in yield, preferably in at least one yield-related trait, preferably in tolerance and/or resistance to environmental stress and an increase biomass production as compared to a corresponding non-transformed wild type plant cell, a plant or a part thereof is conferred. Preferably, the increase occurs cytoplasmic.
Accordingly, in one embodiment, in case the activity of the Saccharomyces cerevisiae nucleic acid molecule or a polypeptide comprising the nucleic acid SEQ ID NO.: 818 or polypeptide SEQ ID NO.: 819, respectively is increased or generated, e.g. if the activity of a nucleic acid molecule or a polypeptide comprising the nucleic acid or polypeptide or the consensus sequence or the polypeptide motif, as depicted in Table I, II or IV, column 7 in the respective same line as SEQ ID NO.: 818 or SEQ ID NO.: 819, respectively is increased or generated or if the activity “arginine/alanine aminopeptidase” is increased or generated in an plant cell, plant or part thereof an increase in yield, preferably in at least one yield-related trait, preferably in tolerance and/or resistance to environmental stress and an increase biomass production as compared to a corresponding non-transformed wild type plant cell, a plant or a part thereof is conferred. Preferably, the increase occurs cytoplasmic.
Accordingly, in one embodiment, in case the activity of the Saccharomyces cerevisiae nucleic acid molecule or a polypeptide comprising the nucleic acid SEQ ID NO.: 925 or polypeptide SEQ ID NO.: 926, respectively is increased or generated, e.g. if the activity of a nucleic acid molecule or a polypeptide comprising the nucleic acid or polypeptide or the consensus sequence or the polypeptide motif, as depicted in Table I, II or IV, column 7 in the respective same line as SEQ ID NO.: 925 or SEQ ID NO.: 926, respectively is increased or generated or if the activity “farnesyl-diphosphate farnesyl transferase” is increased or generated in an plant cell, plant or part thereof an increase in yield, preferably in at least one yield-related trait, preferably in tolerance and/or resistance to environmental stress and an increase biomass production as compared to a corresponding non-transformed wild type plant cell, a plant or a part thereof is conferred. Preferably, the increase occurs plastidic.
Accordingly, in one embodiment, in case the activity of the Saccharomyces cerevisiae nucleic acid molecule or a polypeptide comprising the nucleic acid SEQ ID NO.: 1021 or polypeptide SEQ ID NO.: 1022, respectively is increased or generated, e.g. if the activity of a nucleic acid molecule or a polypeptide comprising the nucleic acid or polypeptide or the consensus sequence or the polypeptide motif, as depicted in Table I, II or IV, column 7 in the respective same line as SEQ ID NO.: 1021 or SEQ ID NO.: 1022, respectively is increased or generated or if the activity “serine hydrolase” is increased or generated in an plant cell, plant or part thereof an increase in yield, preferably in at least one yield-related trait, preferably in tolerance and/or resistance to environmental stress and an increase biomass production as compared to a corresponding non-transformed wild type plant cell, a plant or a part thereof is conferred. Preferably, the increase occurs cytoplasmic.
Accordingly, in one embodiment, in case the activity of the Saccharomyces cerevisiae nucleic acid molecule or a polypeptide comprising the nucleic acid SEQ ID NO.: 1157 or polypeptide SEQ ID NO.: 1158, respectively is increased or generated, e.g. if the activity of a nucleic acid molecule or a polypeptide comprising the nucleic acid or polypeptide or the consensus sequence or the polypeptide motif, as depicted in Table I, II or IV, column 7 in the respective same line as SEQ ID NO.: 1157 or SEQ ID NO.: 1158, respectively is increased or generated or if the activity “phosphoenolpyruvate carboxylkinase” is increased or generated in an plant cell, plant or part thereof an increase in yield, preferably in at least one yield-related trait, preferably in tolerance and/or resistance to environmental stress and an increase biomass production as compared to a corresponding non-transformed wild type plant cell, a plant or a part thereof is conferred. Preferably, the increase occurs cytoplasmic.
Accordingly, in one embodiment, in case the activity of the Saccharomyces cerevisiae nucleic acid molecule or a polypeptide comprising the nucleic acid SEQ ID NO.: 1352 or polypeptide SEQ ID NO.: 1353, respectively is increased or generated, e.g. if the activity of a nucleic acid molecule or a polypeptide comprising the nucleic acid or polypeptide or the consensus sequence or the polypeptide motif, as depicted in Table I, II or IV, column 7 in the respective same line as SEQ ID NO.: 1352 or SEQ ID NO.: 1353, respectively is increased or generated or if the activity “uridine kinase” is increased or generated in an plant cell, plant or part thereof an increase in yield, preferably in at least one yield-related trait, preferably in tolerance and/or resistance to environmental stress and an increase biomass production as compared to a corresponding non-transformed wild type plant cell, a plant or a part thereof is conferred. Preferably, the increase occurs cytoplasmic.
Accordingly, in one embodiment, in case the activity of the Saccharomyces cerevisiae nucleic acid molecule or a polypeptide comprising the nucleic acid SEQ ID NO.: 1423 or polypeptide SEQ ID NO.: 1424, respectively is increased or generated, e.g. if the activity of a nucleic acid molecule or a polypeptide comprising the nucleic acid or polypeptide or the consensus sequence or the polypeptide motif, as depicted in Table I, II or IV, column 7 in the respective same line as SEQ ID NO.: 1423 or SEQ ID NO.: 1424, respectively is increased or generated or if the activity “transcriptional regulator involved in conferring resistance to ketoconazole” is increased or generated in an plant cell, plant or part thereof an increase in yield, preferably in at least one yield-related trait, preferably in tolerance and/or resistance to environmental stress and an increase biomass production as compared to a corresponding non-transformed wild type plant cell, a plant or a part thereof is conferred. Preferably, the increase occurs plastidic.

[0115] In a further embodiment, an increased tolerance to abiotic environmental stress, in particular increased low temperature tolerance, compared to a corresponding non-modified, e.g. a non-transformed, wild type plant is conferred if the activity of a polypeptide comprising the polypeptide shown in SEQ ID NO. 725, or encoded by a nucleic acid molecule comprising the nucleic acid molecule shown in SEQ ID NO. 724, or a homolog of said nucleic acid molecule or polypeptide, is increased or generated. For example, the activity of a corresponding nucleic acid molecule or a polypeptide derived from Saccharomyces cerevisiae is increased or generated, preferably comprising the nucleic acid molecule shown in SEQ ID NO. 724 or polypeptide shown in SEQ ID NO. 725, respectively, or a homolog thereof. E.g. an increased tolerance to abiotic environmental stress, in particular increased low temperature tolerance, compared to a corresponding non-modified, e.g. a non-transformed, wild type plant is conferred if the activity “yal043c-a-protein” or if the activity of a nucleic acid molecule or a polypeptide comprising the nucleic acid or polypeptide or the consensus sequence or the polypeptide motif, depicted in table I, 11 or IV, column 7, respective same line as SEQ ID NO.: 724 or SEQ ID NO.: 725, respectively, is increased or generated in a plant or part thereof. Preferably, the increase occurs cytoplasmic.

Particularly, an increase of yield from 1.1-fold to 1.389-fold, for example plus at least 100% thereof, under conditions of low temperature is conferred compared to a corresponding non-modified, e.g. non-transformed, wild type plant.
In a further embodiment, an increased tolerance to abiotic environmental stress, in particular increased low temperature tolerance, compared to a corresponding non-modified, e.g. a non-transformed, wild type plant is conferred if the activity of a polypeptide comprising the polypeptide shown in SEQ ID NO. 729, or encoded by a nucleic acid molecule comprising the nucleic acid molecule shown in SEQ ID NO. 728, or a homolog of said nucleic acid molecule or polypeptide, is increased or generated. For example, the activity of a corresponding nucleic acid molecule or a polypeptide derived from Saccharomyces cerevisiae is increased or generated, preferably comprising the nucleic acid molecule shown in SEQ ID NO. 728 or polypeptide shown in SEQ ID NO. 729, respectively, or a homolog thereof. E.g. an increased tolerance to abiotic environmental stress, in particular increased low temperature tolerance, compared to a corresponding non-modified, e.g. a non-transformed, wild type plant is conferred if the activity “ybr071w-protein” or if the activity of a nucleic acid molecule or a polypeptide comprising the nucleic acid or polypeptide or the consensus sequence or the polypeptide motif, depicted in table I, II or IV, column 7, respective same line as SEQ ID NO.: 728 or SEQ ID NO.: 729, respectively, is increased or generated in a plant or part thereof. Preferably, the increase occurs plastidic.
Particularly, an increase of yield from 1.1-fold to 1.350-fold, for example plus at least 100% thereof, under conditions of low temperature is conferred compared to a corresponding non-modified, e.g. non-transformed, wild type plant.
In a further embodiment, an increased tolerance to abiotic environmental stress, in particular increased low temperature tolerance, compared to a corresponding non-modified, e.g. a non-transformed, wild type plant is conferred if the activity of a polypeptide comprising the polypeptide shown in SEQ ID NO. 733, or encoded by a nucleic acid molecule comprising the nucleic acid molecule shown in SEQ ID NO. 732, or a homolog of said nucleic acid molecule or polypeptide, is increased or generated. For example, the activity of a corresponding nucleic acid molecule or a polypeptide derived from Saccharomyces cerevisiae is increased or generated, preferably comprising the nucleic acid molecule shown in SEQ ID NO. 732 or polypeptide shown in SEQ ID NO. 733, respectively, or a homolog thereof. E.g. an increased tolerance to abiotic environmental stress, in particular increased low temperature tolerance, compared to a corresponding non-modified, e.g. a non-transformed, wild type plant is conferred if the activity “dityrosine transporter” or if the activity of a nucleic acid molecule or a polypeptide comprising the nucleic acid or polypeptide or the consensus sequence or the polypeptide motif, depicted in table I, II or IV, column 7, respective same line as SEQ ID NO.: 732 or SEQ ID NO.: 733, respectively, is increased or generated in a plant or part thereof. Preferably, the increase occurs cytoplasmic.
Particularly, an increase of yield from 1.1-fold to 1.374-fold, for example plus at least 100% thereof, under conditions of low temperature is conferred compared to a corresponding non-modified, e.g. non-transformed, wild type plant.
In a further embodiment, an increased tolerance to abiotic environmental stress, in particular increased low temperature tolerance, compared to a corresponding non-modified, e.g. a non-transformed, wild type plant is conferred if the activity of a polypeptide comprising the polypeptide shown in SEQ ID NO. 765, or encoded by a nucleic acid molecule comprising the nucleic acid molecule shown in SEQ ID NO. 764, or a homolog of said nucleic acid molecule or polypeptide, is increased or generated. For example, the activity of a corresponding nucleic acid molecule or a polypeptide derived from Saccharomyces cerevisiae is increased or generated, preferably comprising the nucleic acid molecule shown in SEQ ID NO. 764 or polypeptide shown in SEQ ID NO. 765, respectively, or a homolog thereof. E.g. an increased tolerance to abiotic environmental stress, in particular increased low temperature tolerance, compared to a corresponding non-modified, e.g. a non-transformed, wild type plant is conferred if the activity “diacylglycerol pyrophosphate phosphatase” or if the activity of a nucleic acid molecule or a polypeptide comprising the nucleic acid or polypeptide or the consensus sequence or the polypeptide motif, depicted in table I, II or IV, column 7, respective same line as SEQ ID NO.: 764 or SEQ ID NO.: 765, respectively, is increased or generated in a plant or part thereof. Preferably, the increase occurs cytoplasmic.
Particularly, an increase of yield from 1.1-fold to 1.500-fold, for example plus at least 100% thereof, under conditions of low temperature is conferred compared to a corresponding non-modified, e.g. non-transformed, wild type plant.
In a further embodiment, an increased tolerance to abiotic environmental stress, in particular increased low temperature tolerance, compared to a corresponding non-modified, e.g. a non-transformed, wild type plant is conferred if the activity of a polypeptide comprising the polypeptide shown in SEQ ID NO. 1158, or encoded by a nucleic acid molecule comprising the nucleic acid molecule shown in SEQ ID NO. 1157, or a homolog of said nucleic acid molecule or polypeptide, is increased or generated. For example, the activity of a corresponding nucleic acid molecule or a polypeptide derived from Saccharomyces cerevisiae is increased or generated, preferably comprising the nucleic acid molecule shown in SEQ ID NO. 1157 or polypeptide shown in SEQ ID NO. 1158, respectively, or a homolog thereof. E.g. an increased tolerance to abiotic environmental stress, in particular increased low temperature tolerance, compared to a corresponding non-modified, e.g. a non-transformed, wild type plant is conferred if the activity “phosphoenolpyruvate carboxylkinase” or if the activity of a nucleic acid molecule or a polypeptide comprising the nucleic acid or polypeptide or the consensus sequence or the polypeptide motif, depicted in table I, II or IV, column 7, respective same line as SEQ ID NO.: 1157 or SEQ ID NO.: 1158, respectively, is increased or generated in a plant or part thereof. Preferably, the increase occurs cytoplasmic.
Particularly, an increase of yield from 1.1-fold to 1.799-fold, for example plus at least 100% thereof, under conditions of low temperature is conferred compared to a corresponding non-modified, e.g. non-transformed, wild type plant.
Preferably, the increase occurs mitochondric.
Particularly, an increase of yield from 1.1-fold to 1.533-fold, for example plus at least 100% thereof, under conditions of low temperature is conferred compared to a corresponding non-modified, e.g. non-transformed, wild type plant.
In a further embodiment, an increased tolerance to abiotic environmental stress, in particular increased low temperature tolerance, compared to a corresponding non-modified, e.g. a non-transformed, wild type plant is conferred if the activity of a polypeptide comprising the polypeptide shown in SEQ ID NO. 1353, or encoded by a nucleic acid molecule comprising the nucleic acid molecule shown in SEQ ID NO. 1352, or a homolog of said nucleic acid molecule or polypeptide, is increased or generated. For example, the activity of a corresponding nucleic acid molecule or a polypeptide derived from Saccharomyces cerevisiae is increased or generated, preferably comprising the nucleic acid molecule shown in SEQ ID NO. 1352 or polypeptide shown in SEQ ID NO. 1353, respectively, or a homolog thereof. E.g. an increased tolerance to abiotic environmental stress, in particular increased low temperature tolerance, compared to a corresponding non-modified, e.g. a non-transformed, wild type plant is conferred if the activity “uridine kinase” or if the activity of a nucleic acid molecule or a polypeptide comprising the nucleic acid or polypeptide or the consensus sequence or the polypeptide motif, depicted in table I, II or IV, column 7, respective same line as SEQ ID NO.: 1352 or SEQ ID NO.: 1353, respectively, is increased or generated in a plant or part thereof. Preferably, the increase occurs cytoplasmic.
Particularly, an increase of yield from 1.1-fold to 1.399-fold, for example plus at least 100% thereof, under conditions of low temperature is conferred compared to a corresponding non-modified, e.g. non-transformed, wild type plant.

[0116] In a further embodiment, an increased nutrient use efficiency compared to a corresponding non-modified, e.g. a non-transformed, wild type plant is conferred if the activity of a polypeptide comprising the polypeptide shown in SEQ ID NO. 64, or encoded by a nucleic acid molecule comprising the nucleic acid molecule shown in SEQ ID NO. 63, or a homolog of said nucleic acid molecule or polypeptide, is increased or generated. For example, the activity of a corresponding nucleic acid molecule or a polypeptide derived from Escherichia coli is increased or generated, preferably comprising the nucleic acid molecule shown in SEQ ID NO. 63 or polypeptide shown in SEQ ID NO. 64, respectively, or a homolog thereof. E.g. an increased tolerance to abiotic environmental stress, in particular increased nutrient use efficiency as compared to a corresponding non-modified, e.g. a non-transformed, wild type plant cell, a plant or a part thereof is conferred if the activity “NAD+-dependent betaine aldehyde dehydrogenase or” if the activity of a nucleic acid molecule or a polypeptide comprising the nucleic acid or polypeptide or the consensus sequence or the polypeptide motif, as depicted in table I, II or IV, column 7 respective same line as SEQ ID NO. 63 or SEQ ID NO. 64, respectively, is increased or generated in a plant or part thereof. Preferably, the increase occurs plastidic. In one embodiment an increased nitrogen use efficiency is conferred.

Particularly, an increase of yield from 1.05-fold to 1.180-fold, for example plus at least 100% thereof, under conditions of nitrogen deficiency is conferred compared to a corresponding non-modified, e.g. non-transformed, wild type plant.
In a further embodiment, an increased nutrient use efficiency compared to a corresponding non-modified, e.g. a non-transformed, wild type plant is conferred if the activity of a polypeptide comprising the polypeptide shown in SEQ ID NO. 725, or encoded by a nucleic acid molecule comprising the nucleic acid molecule shown in SEQ ID NO. 724, or a homolog of said nucleic acid molecule or polypeptide, is increased or generated. For example, the activity of a corresponding nucleic acid molecule or a polypeptide derived from Saccharomyces cerevisiae is increased or generated, preferably comprising the nucleic acid molecule shown in SEQ ID NO. 724 or polypeptide shown in SEQ ID NO. 725, respectively, or a homolog thereof. E.g. an increased tolerance to abiotic environmental stress, in particular increased nutrient use efficiency as compared to a corresponding non-modified, e.g. a non-transformed, wild type plant cell, a plant or a part thereof is conferred if the activity “yal043c-a-protein or” if the activity of a nucleic acid molecule or a polypeptide comprising the nucleic acid or polypeptide or the consensus sequence or the polypeptide motif, as depicted in table I, 11 or IV, column 7 respective same line as SEQ ID NO. 724 or SEQ ID NO. 725, respectively, is increased or generated in a plant or part thereof. Preferably, the increase occurs cytoplasmic. In one embodiment an increased nitrogen use efficiency is conferred.
Particularly, an increase of yield from 1.05-fold to 1.292-fold, for example plus at least 100% thereof, under conditions of nitrogen deficiency is conferred compared to a corresponding non-modified, e.g. non-transformed, wild type plant.
In a further embodiment, an increased nutrient use efficiency compared to a corresponding non-modified, e.g. a non-transformed, wild type plant is conferred if the activity of a polypeptide comprising the polypeptide shown in SEQ ID NO. 733, or encoded by a nucleic acid molecule comprising the nucleic acid molecule shown in SEQ ID NO. 732, or a homolog of said nucleic acid molecule or polypeptide, is increased or generated. For example, the activity of a corresponding nucleic acid molecule or a polypeptide derived from Saccharomyces cerevisiae is increased or generated, preferably comprising the nucleic acid molecule shown in SEQ ID NO. 732 or polypeptide shown in SEQ ID NO. 733, respectively, or a homolog thereof. E.g. an increased tolerance to abiotic environmental stress, in particular increased nutrient use efficiency as compared to a corresponding non-modified, e.g. a non-transformed, wild type plant cell, a plant or a part thereof is conferred if the activity “dityrosine transporter or” if the activity of a nucleic acid molecule or a polypeptide comprising the nucleic acid or polypeptide or the consensus sequence or the polypeptide motif, as depicted in table I, II or IV, column 7 respective same line as SEQ ID NO. 732 or SEQ ID NO. 733, respectively, is increased or generated in a plant or part thereof. Preferably, the increase occurs cytoplasmic. In one embodiment an increased nitrogen use efficiency is conferred.
Particularly, an increase of yield from 1.05-fold to 1.739-fold, for example plus at least 100% thereof, under conditions of nitrogen deficiency is conferred compared to a corresponding non-modified, e.g. non-transformed, wild type plant.
In a further embodiment, an increased nutrient use efficiency compared to a corresponding non-modified, e.g. a non-transformed, wild type plant is conferred if the activity of a polypeptide comprising the polypeptide shown in SEQ ID NO. 765, or encoded by a nucleic acid molecule comprising the nucleic acid molecule shown in SEQ ID NO. 764, or a homolog of said nucleic acid molecule or polypeptide, is increased or generated. For example, the activity of a corresponding nucleic acid molecule or a polypeptide derived from Saccharomyces cerevisiae is increased or generated, preferably comprising the nucleic acid molecule shown in SEQ ID NO. 764 or polypeptide shown in SEQ ID NO. 765, respectively, or a homolog thereof. E.g. an increased tolerance to abiotic environmental stress, in particular increased nutrient use efficiency as compared to a corresponding non-modified, e.g. a non-transformed, wild type plant cell, a plant or a part thereof is conferred if the activity “diacylglycerol pyrophosphate phosphatase or” if the activity of a nucleic acid molecule or a polypeptide comprising the nucleic acid or polypeptide or the consensus sequence or the polypeptide motif, as depicted in table I, II or IV, column 7 respective same line as SEQ ID NO. 764 or SEQ ID NO. 765, respectively, is increased or generated in a plant or part thereof. Preferably, the increase occurs cytoplasmic. In one embodiment an increased nitrogen use efficiency is conferred.
Particularly, an increase of yield from 1.05-fold to 1.352-fold, for example plus at least 100% thereof, under conditions of nitrogen deficiency is conferred compared to a corresponding non-modified, e.g. non-transformed, wild type plant.
In a further embodiment, an increased nutrient use efficiency compared to a corresponding non-modified, e.g. a non-transformed, wild type plant is conferred if the activity of a polypeptide comprising the polypeptide shown in SEQ ID NO. 815, or encoded by a nucleic acid molecule comprising the nucleic acid molecule shown in SEQ ID NO. 814, or a homolog of said nucleic acid molecule or polypeptide, is increased or generated. For example, the activity of a corresponding nucleic acid molecule or a polypeptide derived from Saccharomyces cerevisiae is increased or generated, preferably comprising the nucleic acid molecule shown in SEQ ID NO. 814 or polypeptide shown in SEQ ID NO. 815, respectively, or a homolog thereof. E.g. an increased tolerance to abiotic environmental stress, in particular increased nutrient use efficiency as compared to a corresponding non-modified, e.g. a non-transformed, wild type plant cell, a plant or a part thereof is conferred if the activity “ydr445c-protein or” if the activity of a nucleic acid molecule or a polypeptide comprising the nucleic acid or polypeptide or the consensus sequence or the polypeptide motif, as depicted in table I, II or IV, column 7 respective same line as SEQ ID NO. 814 or SEQ ID NO. 815, respectively, is increased or generated in a plant or part thereof. Preferably, the increase occurs cytoplasmic. In one embodiment an increased nitrogen use efficiency is conferred.
Particularly, an increase of yield from 1.05-fold to 1.197-fold, for example plus at least 100% thereof, under conditions of nitrogen deficiency is conferred compared to a corresponding non-modified, e.g. non-transformed, wild type plant.
In a further embodiment, an increased nutrient use efficiency compared to a corresponding non-modified, e.g. a non-transformed, wild type plant is conferred if the activity of a polypeptide comprising the polypeptide shown in SEQ ID NO. 926, or encoded by a nucleic acid molecule comprising the nucleic acid molecule shown in SEQ ID NO. 925, or a homolog of said nucleic acid molecule or polypeptide, is increased or generated. For example, the activity of a corresponding nucleic acid molecule or a polypeptide derived from Saccharomyces cerevisiae is increased or generated, preferably comprising the nucleic acid molecule shown in SEQ ID NO. 925 or polypeptide shown in SEQ ID NO. 926, respectively, or a homolog thereof. E.g. an increased tolerance to abiotic environmental stress, in particular increased nutrient use efficiency as compared to a corresponding non-modified, e.g. a non-transformed, wild type plant cell, a plant or a part thereof is conferred if the activity “farnesyl-diphosphate farnesyl transferase or” if the activity of a nucleic acid molecule or a polypeptide comprising the nucleic acid or polypeptide or the consensus sequence or the polypeptide motif, as depicted in table I, II or IV, column 7 respective same line as SEQ ID NO. 925 or SEQ ID NO. 926, respectively, is increased or generated in a plant or part thereof. Preferably, the increase occurs plastidic. In one embodiment an increased nitrogen use efficiency is conferred.
Particularly, an increase of yield from 1.05-fold to 1.181-fold, for example plus at least 100% thereof, under conditions of nitrogen deficiency is conferred compared to a corresponding non-modified, e.g. non-transformed, wild type plant.
In a further embodiment, an increased nutrient use efficiency compared to a corresponding non-modified, e.g. a non-transformed, wild type plant is conferred if the activity of a polypeptide comprising the polypeptide shown in SEQ ID NO. 1022, or encoded by a nucleic acid molecule comprising the nucleic acid molecule shown in SEQ ID NO. 1021, or a homolog of said nucleic acid molecule or polypeptide, is increased or generated. For example, the activity of a corresponding nucleic acid molecule or a polypeptide derived from Saccharomyces cerevisiae is increased or generated, preferably comprising the nucleic acid molecule shown in SEQ ID NO. 1021 or polypeptide shown in SEQ ID NO. 1022, respectively, or a homolog thereof. E.g. an increased tolerance to abiotic environmental stress, in particular increased nutrient use efficiency as compared to a corresponding non-modified, e.g. a non-transformed, wild type plant cell, a plant or a part thereof is conferred if the activity “serine hydrolase or” if the activity of a nucleic acid molecule or a polypeptide comprising the nucleic acid or polypeptide or the consensus sequence or the polypeptide motif, as depicted in table I, II or IV, column 7 respective same line as SEQ ID NO. 1021 or SEQ ID NO. 1022, respectively, is increased or generated in a plant or part thereof. Preferably, the increase occurs cytoplasmic. In one embodiment an increased nitrogen use efficiency is conferred.
Particularly, an increase of yield from 1.05-fold to 1.255-fold, for example plus at least 100% thereof, under conditions of nitrogen deficiency is conferred compared to a corresponding non-modified, e.g. non-transformed, wild type plant.
In a further embodiment, an increased nutrient use efficiency compared to a corresponding non-modified, e.g. a non-transformed, wild type plant is conferred if the activity of a polypeptide comprising the polypeptide shown in SEQ ID NO. 1158, or encoded by a nucleic acid molecule comprising the nucleic acid molecule shown in SEQ ID NO. 1157, or a homolog of said nucleic acid molecule or polypeptide, is increased or generated. For example, the activity of a corresponding nucleic acid molecule or a polypeptide derived from Saccharomyces cerevisiae is increased or generated, preferably comprising the nucleic acid molecule shown in SEQ ID NO. 1157 or polypeptide shown in SEQ ID NO. 1158, respectively, or a homolog thereof. E.g. an increased tolerance to abiotic environmental stress, in particular increased nutrient use efficiency as compared to a corresponding non-modified, e.g. a non-transformed, wild type plant cell, a plant or a part thereof is conferred if the activity “phosphoenolpyruvate carboxylkinase or” if the activity of a nucleic acid molecule or a polypeptide comprising the nucleic acid or polypeptide or the consensus sequence or the polypeptide motif, as depicted in table I, II or IV, column 7 respective same line as SEQ ID NO. 1157 or SEQ ID NO. 1158, respectively, is increased or generated in a plant or part thereof.
Preferably, the increase occurs cytoplasmic. In one embodiment an increased nitrogen use efficiency is conferred.
Particularly, an increase of yield from 1.05-fold to 1.313-fold, for example plus at least 100% thereof, under conditions of nitrogen deficiency is conferred compared to a corresponding non-modified, e.g. non-transformed, wild type plant.
Preferably, the increase occurs mitochondric. In one embodiment an increased nitrogen use efficiency is conferred.
Particularly, an increase of yield from 1.05-fold to 1.264-fold, for example plus at least 100% thereof, under conditions of nitrogen deficiency is conferred compared to a corresponding non-modified, e.g. non-transformed, wild type plant.
In a further embodiment, an increased nutrient use efficiency compared to a corresponding non-modified, e.g. a non-transformed, wild type plant is conferred if the activity of a polypeptide comprising the polypeptide shown in SEQ ID NO. 1353, or encoded by a nucleic acid molecule comprising the nucleic acid molecule shown in SEQ ID NO. 1352, or a homolog of said nucleic acid molecule or polypeptide, is increased or generated. For example, the activity of a corresponding nucleic acid molecule or a polypeptide derived from Saccharomyces cerevisiae is increased or generated, preferably comprising the nucleic acid molecule shown in SEQ ID NO. 1352 or polypeptide shown in SEQ ID NO. 1353, respectively, or a homolog thereof. E.g. an increased tolerance to abiotic environmental stress, in particular increased nutrient use efficiency as compared to a corresponding non-modified, e.g. a non-transformed, wild type plant cell, a plant or a part thereof is conferred if the activity “uridine kinase or” if the activity of a nucleic acid molecule or a polypeptide comprising the nucleic acid or polypeptide or the consensus sequence or the polypeptide motif, as depicted in table I, II or IV, column 7 respective same line as SEQ ID NO. 1352 or SEQ ID NO. 1353, respectively, is increased or generated in a plant or part thereof. Preferably, the increase occurs cytoplasmic. In one embodiment an increased nitrogen use efficiency is conferred.
Particularly, an increase of yield from 1.05-fold to 1.194-fold, for example plus at least 100% thereof, under conditions of nitrogen deficiency is conferred compared to a corresponding non-modified, e.g. non-transformed, wild type plant.

[0117] In a further embodiment, an increased tolerance to abiotic environmental stress, in particular increased intrinsic yield, compared to a corresponding non-modified, e.g. a non-transformed, wild type plant is conferred if the activity of a polypeptide comprising the polypeptide shown in SEQ ID NO. 64, or encoded by a nucleic acid molecule comprising the nucleic acid molecule shown in SEQ ID NO. 63, or a homolog of said nucleic acid molecule or polypeptide, is increased or generated. For example, the activity of a corresponding nucleic acid molecule or a polypeptide derived from Escherichia coli is increased or generated, preferably comprising the nucleic acid molecule shown in SEQ ID NO. 63 or polypeptide shown in SEQ ID NO. 64, respectively, or a homolog thereof. E.g. an increased tolerance to abiotic environmental stress, in particular increased intrinsic yield, compared to a corresponding non-modified, e.g. a non-transformed, wild type plant is conferred if the activity “NAD+-dependent betaine aldehyde dehydrogenase” or if the activity of a nucleic acid molecule or a polypeptide comprising the nucleic acid or polypeptide or the consensus sequence or the polypeptide motif, depicted in table I, II or IV, column 7, respective same line as SEQ ID NO.: 63 or SEQ ID NO.: 64, respectively, is increased or generated in a plant or part thereof. Preferably, the increase occurs plastidic.

Particularly, an increase of yield from 1.05-fold to 1.353-fold, for example plus at least 100% thereof, under standard conditions, e.g. in the absence of nutrient deficiency and/or stress conditions is conferred compared to a corresponding control, e.g. an non-modified, e.g. non-transformed, wild type plant.
In a further embodiment, an increased tolerance to abiotic environmental stress, in particular increased intrinsic yield, compared to a corresponding non-modified, e.g. a non-transformed, wild type plant is conferred if the activity of a polypeptide comprising the polypeptide shown in SEQ ID NO. 725, or encoded by a nucleic acid molecule comprising the nucleic acid molecule shown in SEQ ID NO. 724, or a homolog of said nucleic acid molecule or polypeptide, is increased or generated. For example, the activity of a corresponding nucleic acid molecule or a polypeptide derived from Saccharomyces cerevisiae is increased or generated, preferably comprising the nucleic acid molecule shown in SEQ ID NO. 724 or polypeptide shown in SEQ ID NO. 725, respectively, or a homolog thereof. E.g. an increased tolerance to abiotic environmental stress, in particular increased intrinsic yield, compared to a corresponding non-modified, e.g. a non-transformed, wild type plant is conferred if the activity “yal043c-a-protein” or if the activity of a nucleic acid molecule or a polypeptide comprising the nucleic acid or polypeptide or the consensus sequence or the polypeptide motif, depicted in table I, II or IV, column 7, respective same line as SEQ ID NO.: 724 or SEQ ID NO.: 725, respectively, is increased or generated in a plant or part thereof. Preferably, the increase occurs cytoplasmic.
Particularly, an increase of yield from 1.05-fold to 1.411-fold, for example plus at least 100% thereof, under standard conditions, e.g. in the absence of nutrient deficiency and/or stress conditions is conferred compared to a corresponding control, e.g. an non-modified, e.g. non-transformed, wild type plant.
In a further embodiment, an increased tolerance to abiotic environmental stress, in particular increased intrinsic yield, compared to a corresponding non-modified, e.g. a non-transformed, wild type plant is conferred if the activity of a polypeptide comprising the polypeptide shown in SEQ ID NO. 733, or encoded by a nucleic acid molecule comprising the nucleic acid molecule shown in SEQ ID NO. 732, or a homolog of said nucleic acid molecule or polypeptide, is increased or generated. For example, the activity of a corresponding nucleic acid molecule or a polypeptide derived from Saccharomyces cerevisiae is increased or generated, preferably comprising the nucleic acid molecule shown in SEQ ID NO. 732 or polypeptide shown in SEQ ID NO. 733, respectively, or a homolog thereof. E.g. an increased tolerance to abiotic environmental stress, in particular increased intrinsic yield, compared to a corresponding non-modified, e.g. a non-transformed, wild type plant is conferred if the activity “dityrosine transporter” or if the activity of a nucleic acid molecule or a polypeptide comprising the nucleic acid or polypeptide or the consensus sequence or the polypeptide motif, depicted in table I, II or IV, column 7, respective same line as SEQ ID NO.: 732 or SEQ ID NO.: 733, respectively, is increased or generated in a plant or part thereof. Preferably, the increase occurs cytoplasmic.
Particularly, an increase of yield from 1.05-fold to 1.449-fold, for example plus at least 100% thereof, under standard conditions, e.g. in the absence of nutrient deficiency and/or stress conditions is conferred compared to a corresponding control, e.g. an non-modified, e.g. non-transformed, wild type plant.

[0118] In a further embodiment, an increased tolerance to abiotic environmental stress, in particular increased intrinsic yield, compared to a corresponding non-modified, e.g. a non-transformed, wild type plant is conferred if the activity of a polypeptide comprising the polypeptide shown in SEQ ID NO. 819, or encoded by a nucleic acid molecule comprising the nucleic acid molecule shown in SEQ ID NO. 818, or a homolog of said nucleic acid molecule or polypeptide, is increased or generated. For example, the activity of a corresponding nucleic acid molecule or a polypeptide derived from Saccharomyces cerevisiae is increased or generated, preferably comprising the nucleic acid molecule shown in SEQ ID NO. 818 or polypeptide shown in SEQ ID NO. 819, respectively, or a homolog thereof. E.g. an increased tolerance to abiotic environmental stress, in particular increased intrinsic yield, compared to a corresponding non-modified, e.g. a non-transformed, wild type plant is conferred if the activity “arginine/alanine aminopeptidase” or if the activity of a nucleic acid molecule or a polypeptide comprising the nucleic acid or polypeptide or the consensus sequence or the polypeptide motif, depicted in table I, II or IV, column 7, respective same line as SEQ ID NO.: 818 or SEQ ID NO.: 819, respectively, is increased or generated in a plant or part thereof. Preferably, the increase occurs cytoplasmic.

Particularly, an increase of yield from 1.05-fold to 1.179-fold, for example plus at least 100% thereof, under standard conditions, e.g. in the absence of nutrient deficiency and/or stress conditions is conferred compared to a corresponding control, e.g. an non-modified, e.g. non-transformed, wild type plant.
In a further embodiment, an increased tolerance to abiotic environmental stress, in particular increased intrinsic yield, compared to a corresponding non-modified, e.g. a non-transformed, wild type plant is conferred if the activity of a polypeptide comprising the polypeptide shown in SEQ ID NO. 1158, or encoded by a nucleic acid molecule comprising the nucleic acid molecule shown in SEQ ID NO. 1157, or a homolog of said nucleic acid molecule or polypeptide, is increased or generated. For example, the activity of a corresponding nucleic acid molecule or a polypeptide derived from Saccharomyces cerevisiae is increased or generated, preferably comprising the nucleic acid molecule shown in SEQ ID NO. 1157 or polypeptide shown in SEQ ID NO. 1158, respectively, or a homolog thereof. E.g. an increased tolerance to abiotic environmental stress, in particular increased intrinsic yield, compared to a corresponding non-modified, e.g. a non-transformed, wild type plant is conferred if the activity “phosphoenolpyruvate carboxylkinase” or if the activity of a nucleic acid molecule or a polypeptide comprising the nucleic acid or polypeptide or the consensus sequence or the polypeptide motif, depicted in table I, II or IV, column 7, respective same line as SEQ ID NO.: 1157 or SEQ ID NO.: 1158, respectively, is increased or generated in a plant or part thereof.
Preferably, the increase occurs mitochondric.
Particularly, an increase of yield from 1.05-fold to 1.619-fold, for example plus at least 100% thereof, under standard conditions, e.g. in the absence of nutrient deficiency and/or stress conditions is conferred compared to a corresponding control, e.g. an non-modified, e.g. non-transformed, wild type plant.

[0119] In a further embodiment, an increased tolerance to abiotic environmental stress, in particular increased intrinsic yield, compared to a corresponding non-modified, e.g. a non-transformed, wild type plant is conferred if the activity of a polypeptide comprising the polypeptide shown in SEQ ID NO. 1353, or encoded by a nucleic acid molecule comprising the nucleic acid molecule shown in SEQ ID NO. 1352, or a homolog of said nucleic acid molecule or polypeptide, is increased or generated. For example, the activity of a corresponding nucleic acid molecule or a polypeptide derived from Saccharomyces cerevisiae is increased or generated, preferably comprising the nucleic acid molecule shown in SEQ ID NO. 1352 or polypeptide shown in SEQ ID NO. 1353, respectively, or a homolog thereof. E.g. an increased tolerance to abiotic environmental stress, in particular increased intrinsic yield, compared to a corresponding non-modified, e.g. a non-transformed, wild type plant is conferred if the activity “uridine kinase” or if the activity of a nucleic acid molecule or a polypeptide comprising the nucleic acid or polypeptide or the consensus sequence or the polypeptide motif, depicted in table I, II or IV, column 7, respective same line as SEQ ID NO.: 1352 or SEQ ID NO.: 1353, respectively, is increased or generated in a plant or part thereof. Preferably, the increase occurs cytoplasmic.

Particularly, an increase of yield from 1.05-fold to 1.314-fold, for example plus at least 100% thereof, under standard conditions, e.g. in the absence of nutrient deficiency and/or stress conditions is conferred compared to a corresponding control, e.g. an non-modified, e.g. non-transformed, wild type plant.

[0120] For the purposes of the invention, as a rule the plural is intended to encompass the singular and vice versa.

Unless otherwise specified, the terms “polynucleotides”, “nucleic acid” and “nucleic acid molecule” are interchangeably in the present context. Unless otherwise specified, the terms “peptide”, “polypeptide” and “protein” are interchangeably in the present context. The term “sequence” may relate to polynucleotides, nucleic acids, nucleic acid molecules, peptides, polypeptides and proteins, depending on the context in which the term “sequence” is used. The terms “gene(s)”, “polynucleotide”, “nucleic acid sequence”, “nucleotide sequence”, or “nucleic acid molecule(s)” as used herein refers to a polymeric form of nucleotides of any length, either ribonucleotides or deoxyribonucleotides. The terms refer only to the primary structure of the molecule.
Thus, the terms “gene(s)”, “polynucleotide”, “nucleic acid sequence”, “nucleotide sequence”, or “nucleic acid molecule(s)” as used herein include double- and single-stranded DNA and/or RNA. They also include known types of modifications, for example, methylation, “caps”, substitutions of one or more of the naturally occurring nucleotides with an analog. Preferably, the DNA or RNA sequence comprises a coding sequence encoding the herein defined polypeptide.
A “coding sequence” is a nucleotide sequence, which is transcribed into an RNA, e.g. a regulatory RNA, such as a miRNA, a ta-siRNA, cosuppression molecule, an RNAi, a ribozyme, etc. or into a mRNA which is translated into a polypeptide when placed under the control of appropriate regulatory sequences. The boundaries of the coding sequence are determined by a translation start codon at the 5′-terminus and a translation stop codon at the 3′-terminus. A coding sequence can include, but is not limited to mRNA, cDNA, recombinant nucleotide sequences or genomic DNA, while introns may be present as well under certain circumstances.
As used in the present context a nucleic acid molecule may also encompass the untranslated sequence located at the 3′ and at the 5′ end of the coding gene region, for example at least 500, preferably 200, especially preferably 100, nucleotides of the sequence upstream of the 5′ end of the coding region and at least 100, preferably 50, especially preferably 20, nucleotides of the sequence downstream of the 3′ end of the coding gene region. In the event for example the antisense, RNAi, snRNA, dsRNA, siRNA, miRNA, ta-siRNA, cosuppression molecule, ribozyme etc. technology is used coding regions as well as the 5′-and/or 3′-regions can advantageously be used.
However, it is often advantageous only to choose the coding region for cloning and expression purposes.
“Polypeptide” refers to a polymer of amino acid (amino acid sequence) and does not refer to a specific length of the molecule. Thus, peptides and oligopeptides are included within the definition of polypeptide. This term does also refer to or include posttranslational modifications of the polypeptide, for example, glycosylations, acetylations, phosphorylations and the like. Included within the definition are, for example, polypeptides containing one or more analogs of an amino acid (including, for example, unnatural amino acids, etc.), polypeptides with substituted linkages, as well as other modifications known in the art, both naturally occurring and non-naturally occurring.
The term “Table I” used in this specification is to be taken to specify the content of Table I A and Table I B. The term “Table II” used in this specification is to be taken to specify the content of Table II A and Table II B. The term “Table I A” used in this specification is to be taken to specify the content of Table I A. The term “Table I B” used in this specification is to be taken to specify the content of Table I B. The term “Table II A” used in this specification is to be taken to specify the content of Table II A. The term “Table II B” used in this specification is to be taken to specify the content of Table II B. In one preferred embodiment, the term “Table I” means Table I B. In one preferred embodiment, the term “Table II” means Table II B.
The terms “comprise” or “comprising” and grammatical variations thereof when used in this specification are to be taken to specify the presence of stated features, integers, steps or components or groups thereof, but not to preclude the presence or addition of one or more other features, integers, steps, components or groups thereof.

[0121] In accordance with the invention, a protein or polypeptide has the “activity of an protein as shown in table II, column 3” if its de novo activity, or its increased expression directly or indirectly leads to and confers an increased yield, preferably under increased yield, preferably under condition of transient and repetitive abiotic stress as compared to a corresponding non-transformed wild type plant cell, plant or part thereof and the protein has the above mentioned activities of a protein as shown in table II, column 3. Throughout the specification the activity or preferably the biological activity of such a protein or polypeptide or an nucleic acid molecule or sequence encoding such protein or polypeptide is identical or similar if it still has the biological or enzymatic activity of a protein as shown in table II, column 3, or which has at least 10% of the original enzymatic activity, preferably 20%, particularly preferably 30%, most particularly preferably 40% in comparison to a protein as shown in table II, column 3 of E. coli or Saccharomyces cerevisiae.

[0122] The terms “increased”, “rised”, “extended”, “enhanced”, “improved” or “amplified” relate to a corresponding change of a property in a plant, an organism, a part of an organism such as a tissue, seed, root, leave, flower etc. or in a cell and are interchangeable. Preferably, the overall activity in the volume is increased or enhanced in cases if the increase or enhancement is related to the increase or enhancement of an activity of a gene product, independent whether the amount of gene product or the specific activity of the gene product or both is increased or enhanced or whether the amount, stability or translation efficacy of the nucleic acid sequence or gene encoding for the gene product is increased or enhanced.

The terms “increase” relate to a corresponding change of a property an organism or in a part of a plant, an organism, such as a tissue, seed, root, leave, flower etc. or in a cell. Preferably, the overall activity in the volume is increased in cases the increase relates to the increase of an activity of a gene product, independent whether the amount of gene product or the specific activity of the gene product or both is increased or generated or whether the amount, stability or translation efficacy of the nucleic acid sequence or gene encoding for the gene product is increased.
Under “change of a property” it is understood that the activity, expression level or amount of a gene product or the metabolite content is changed in a specific volume relative to a corresponding volume of a control, reference or wild type, including the de novo creation of the activity or expression.
The terms “increase” include the change of said property in only parts of the subject of the present invention, for example, the modification can be found in compartment of a cell, like a organelle, or in a part of a plant, like tissue, seed, root, leave, flower etc. but is not detectable if the overall subject, i.e. complete cell or plant, is tested.
Accordingly, the term “increase” means that the specific activity of an enzyme as well as the amount of a compound or metabolite, e.g. of a polypeptide, a nucleic acid molecule of the invention or an encoding mRNA or DNA, can be increased in a volume.

[0123] The terms “wild type”, “control” or “reference” are exchangeable and can be a cell or a part of organisms such as an organelle like a chloroplast or a tissue, or an organism, in particular a plant, which was not modified or treated according to the herein described process according to the invention. Accordingly, the cell or a part of organisms such as an organelle like a chloroplast or a tissue, or an organism, in particular a plant used as wild typ, control or reference corresponds to the cell, organism, plant or part thereof as much as possible and is in any other property but in the result of the process of the invention as identical to the subject matter of the invention as possible. Thus, the wild type, control or reference is treated identically or as identical as possible, saying that only conditions or properties might be different which do not influence the quality of the tested property.

Preferably, any comparison is carried out under analogous conditions. The term “analogous conditions” means that all conditions such as, for example, culture or growing conditions, water content of the soil, temperature, humidity or surrounding air or soil, assay conditions (such as buffer composition, temperature, substrates, pathogen strain, concentrations and the like) are kept identical between the experiments to be compared.
The “reference”, “control”, or “wild type” is preferably a subject, e.g. an organelle, a cell, a tissue, an organism, in particular a plant, which was not modified or treated according to the herein described process of the invention and is in any other property as similar to the subject matter of the invention as possible. The reference, control or wild type is in its genome, transcriptome, proteome or metabolome as similar as possible to the subject of the present invention. Preferably, the term “reference-” “control-” or “wild type-”-organelle, -cell, -tissue or -organism, in particular plant, relates to an organelle, cell, tissue or organism, in particular plant, which is nearly genetically identical to the organelle, cell, tissue or organism, in particular plant, of the present invention or a part thereof preferably 95%, more preferred are 98%, even more preferred are 99.00%, in particular 99.10%, 99.30%, 99.50%, 99.70%, 99.90%, 99.99%, 99.999% or more. Most preferable the “reference”, “control”, or “wild type” is a subject, e.g. an organelle, a cell, a tissue, an organism, which is genetically identical to the organism, cell or organelle used according to the process of the invention except that the responsible or activity conferring nucleic acid molecules or the gene product encoded by them are amended, manipulated, exchanged or introduced according to the inventive process.

[0124] In case, a control, reference or wild type differing from the subject of the present invention only by not being subject of the process of the invention can not be provided, a control, reference or wild type can be an organism in which the cause for the modulation of an activity conferring the increased yield, preferably under increased yield, preferably under condition of transient and repetitive abiotic stress as compared to a corresponding non-transformed wild type plant cell, plant or part thereof or expression of the nucleic acid molecule of the invention as described herein has been switched back or off, e.g. by knocking out the expression of responsible gene product, e.g. by antisense inhibition, by inactivation of an activator or agonist, by activation of an inhibitor or antagonist, by inhibition through adding inhibitory antibodies, by adding active compounds as e.g. hormones, by introducing negative dominant mutants, etc. A gene production can for example be knocked out by introducing inactivating point mutations, which lead to an enzymatic activity inhibition or a destabilization or an inhibition of the ability to bind to cofactors etc.

[0125] Accordingly, preferred reference subject is the starting subject of the present process of the invention. Preferably, the reference and the subject matter of the invention are compared after standardization and normalization, e.g. to the amount of total RNA, DNA, or Protein or activity or expression of reference genes, like housekeeping genes, such as ubiquitin, actin or ribosomal proteins.

[0126] The increase or modulation according to this invention can be constitutive, e.g. due to a stable permanent transgenic expression or to a stable mutation in the corresponding endogenous gene encoding the nucleic acid molecule of the invention or to a modulation of the expression or of the behavior of a gene conferring the expression of the polypeptide of the invention, or transient, e.g. due to an transient transformation or temporary addition of a modulator such as a agonist or antagonist or inducible, e.g. after transformation with a inducible construct carrying the nucleic acid molecule of the invention under control of a inducible promoter and adding the inducer, e.g. tetracycline or as described herein below.

[0127] The increase in activity of the polypeptide amounts in a cell, a tissue, a organelle, an organ or an organism or a part thereof preferably to at least 5%, preferably to at least 20% or at to least 50%, especially preferably to at least 70%, 80%, 90% or more, very especially preferably are to at least 200%, 300% or 400%, most preferably are to at least 500% or more in comparison to the control, reference or wild type. In one embodiment the term increase means the increase in amount in relation to the weight of the organism or part thereof (w/w).

In one embodiments the increase in activity of the polypeptide amounts in an organelle such as a plastid.

[0128] The specific activity of a polypeptide encoded by a nucleic acid molecule of the present invention or of the polypeptide of the present invention can be tested as described in the examples. In particular, the expression of a protein in question in a cell, e.g. a plant cell in comparison to a control is an easy test and can be performed as described in the state of the art.

[0129] The term “increase” includes, that a compound or an activity is introduced into a cell or a subcellular compartment or organelle de novo or that the compound or the activity has not been detectable before, in other words it is “generated”.

Accordingly, in the following, the term “increasing” also comprises the term “generating” or “stimulating”. The increased activity manifests itself in an increase of the increased yield, preferably under increased yield, preferably under condition of transient and repetitive abiotic stress as compared to a corresponding non-transformed wild type plant cell, plant or part thereof.

[0130] The sequence of B0312 from Escherichia coli, e.g. as shown in column 5 of Table I, [sequences from Saccharomyces cerevisiae has been published in Goffeau et al., Science 274 (5287), 546-547, 1996, sequences from Escherichia coli has been published in Blattner et al., Science 277 (5331), 1453-1474 (1997), and its activity is published described as NAD+-dependent betaine aldehyde dehydrogenase. Accordingly, in one embodiment, the process of the present invention comprises increasing or generating the activity of a gene product with the activity of a “NAD+-dependent betaine aldehyde dehydrogenase” from Escherichia coli or its functional equivalent or its homolog, e.g. the increase of
[0131] (a) a gene product of a gene comprising the nucleic acid molecule as shown in column 5 of Table I and being depicted in the same respective line as said B0312 or a functional equivalent or a homologue thereof as shown depicted in column 7 of Table I, preferably a homologue or functional equivalent as shown depicted in column 7 of Table I B, and being depicted in the same respective line as said B0312; or
[0132] (b) a polypeptide comprising a polypeptide, a consensus sequence or a polypeptide motif as shown depicted in column 5 of Table II, and being depicted in the same respective line as said B0312 or a functional equivalent or a homologue thereof as depicted in column 7 of Table II or IV, preferably a homologue or functional equivalent as depicted in column 7 of Table II B, and being depicted in the same respective line as said B0312,
   as mentioned herein, for the an increased yield, preferably under condition of transient and repetitive abiotic stress as compared to a corresponding non-transformed wild type plant cell, plant or part thereof in plant cell, plant or part thereof, as mentioned. Accordingly, in one embodiment, the molecule which activity is to be increased in the process of the invention is the gene product with an activity of described as a “NAD+-dependent betaine aldehyde dehydrogenase”, preferably it is the molecule of section (a) or (b) of this paragraph.
   In one embodiment, said molecule, which activity is to be increased in the process of the invention and which is the gene product with an activity of described as a “NAD+-dependent betaine aldehyde dehydrogenase”, is increased plastidic.
   The sequence of B3182 from Escherichia coli, e.g. as shown in column 5 of Table I, [sequences from Saccharomyces cerevisiae has been published in Goffeau et al., Science 274 (5287), 546-547, 1996, sequences from Escherichia coli has been published in Blattner et al., Science 277 (5331), 1453-1474 (1997), and its activity is published described as D-alanyl-D-alanine carboxypeptidase.
   Accordingly, in one embodiment, the process of the present invention comprises increasing or generating the activity of a gene product with the activity of a “D-alanyl-D-alanine carboxypeptidase” from Escherichia coli or its functional equivalent or its homolog, e.g. the increase of
[0133] (a) a gene product of a gene comprising the nucleic acid molecule as shown in column 5 of Table I and being depicted in the same respective line as said B3182 or a functional equivalent or a homologue thereof as shown depicted in column 7 of Table I, preferably a homologue or functional equivalent as shown depicted in column 7 of Table I B, and being depicted in the same respective line as said B3182; or
[0134] (b) a polypeptide comprising a polypeptide, a consensus sequence or a polypeptide motif as shown depicted in column 5 of Table II, and being depicted in the same respective line as said B3182 or a functional equivalent or a homologue thereof as depicted in column 7 of Table II or IV, preferably a homologue or functional equivalent as depicted in column 7 of Table II B, and being depicted in the same respective line as said B3182,
   as mentioned herein, for the an increased yield, preferably under condition of transient and repetitive abiotic stress as compared to a corresponding non-transformed wild type plant cell, plant or part thereof in plant cell, plant or part thereof, as mentioned. Accordingly, in one embodiment, the molecule which activity is to be increased in the process of the invention is the gene product with an activity of described as a “D-alanyl-D-alanine carboxypeptidase”, preferably it is the molecule of section (a) or (b) of this paragraph.
   In one embodiment, said molecule, which activity is to be increased in the process of the invention and which is the gene product with an activity of described as a “D-alanyl-D-alanine carboxypeptidase”, is increased cytoplasmic.
   The sequence of Yal043c-a from Saccharomyces cerevisiae, e.g. as shown in column 5 of Table I, [sequences from Saccharomyces cerevisiae has been published in Goffeau et al., Science 274 (5287), 546-547, 1996, sequences from Escherichia coli has been published in Blattner et al., Science 277 (5331), 1453-1474 (1997), and its activity is published described as yal043c-a-protein.
   Accordingly, in one embodiment, the process of the present invention comprises increasing or generating the activity of a gene product with the activity of a “yal043c-a-protein” from Saccharomyces cerevisiae or its functional equivalent or its homolog, e.g. the increase of
[0135] (a) a gene product of a gene comprising the nucleic acid molecule as shown in column 5 of Table I and being depicted in the same respective line as said Yal043c-a or a functional equivalent or a homologue thereof as shown depicted in column 7 of Table I, preferably a homologue or functional equivalent as shown depicted in column 7 of Table I B, and being depicted in the same respective line as said Yal043c-a; or
[0136] (b) a polypeptide comprising a polypeptide, a consensus sequence or a polypeptide motif as shown depicted in column 5 of Table II, and being depicted in the same respective line as said Yal043c-a or a functional equivalent or a homologue thereof as depicted in column 7 of Table II or IV, preferably a homologue or functional equivalent as depicted in column 7 of Table II B, and being depicted in the same respective line as said Yal043c-a,
   as mentioned herein, for the an increased yield, preferably under condition of transient and repetitive abiotic stress as compared to a corresponding non-transformed wild type plant cell, plant or part thereof in plant cell, plant or part thereof, as mentioned. Accordingly, in one embodiment, the molecule which activity is to be increased in the process of the invention is the gene product with an activity of described as a “yal043c-a-protein”, preferably it is the molecule of section (a) or (b) of this paragraph.
   In one embodiment, said molecule, which activity is to be increased in the process of the invention and which is the gene product with an activity of described as a “yal043c-a-protein”, is increased cytoplasmic.
   The sequence of Ybr071w from Saccharomyces cerevisiae, e.g. as shown in column 5 of Table I, [sequences from Saccharomyces cerevisiae has been published in Goffeau et al., Science 274 (5287), 546-547, 1996, sequences from Escherichia coli has been published in Blattner et al., Science 277 (5331), 1453-1474 (1997), and its activity is published described as ybr071w-protein.
   Accordingly, in one embodiment, the process of the present invention comprises increasing or generating the activity of a gene product with the activity of a “ybr071w-protein” from Saccharomyces cerevisiae or its functional equivalent or its homolog, e.g. the increase of
[0137] (a) a gene product of a gene comprising the nucleic acid molecule as shown in column 5 of Table I and being depicted in the same respective line as said Ybr071w or a functional equivalent or a homologue thereof as shown depicted in column 7 of Table I, preferably a homologue or functional equivalent as shown depicted in column 7 of Table I B, and being depicted in the same respective line as said Ybr071w; or
[0138] (b) a polypeptide comprising a polypeptide, a consensus sequence or a polypeptide motif as shown depicted in column 5 of Table II, and being depicted in the same respective line as said Ybr071w or a functional equivalent or a homologue thereof as depicted in column 7 of Table II or IV, preferably a homologue or functional equivalent as depicted in column 7 of Table II B, and being depicted in the same respective line as said Ybr071w,
   as mentioned herein, for the an increased yield, preferably under condition of transient and repetitive abiotic stress as compared to a corresponding non-transformed wild type plant cell, plant or part thereof in plant cell, plant or part thereof, as mentioned. Accordingly, in one embodiment, the molecule which activity is to be increased in the process of the invention is the gene product with an activity of described as a “ybr071w-protein”, preferably it is the molecule of section (a) or (b) of this paragraph. In one embodiment, said molecule, which activity is to be increased in the process of the invention and which is the gene product with an activity of described as a “ybr071w-protein”, is increased plastidic.
   The sequence of Ybr180w from Saccharomyces cerevisiae, e.g. as shown in column 5 of Table I, [sequences from Saccharomyces cerevisiae has been published in Goffeau et al., Science 274 (5287), 546-547, 1996, sequences from Escherichia coli has been published in Blattner et al., Science 277 (5331), 1453-1474 (1997), and its activity is published described as dityrosine transporter.
   Accordingly, in one embodiment, the process of the present invention comprises increasing or generating the activity of a gene product with the activity of a “dityrosine transporter” from Saccharomyces cerevisiae or its functional equivalent or its homolog, e.g. the increase of
[0139] (a) a gene product of a gene comprising the nucleic acid molecule as shown in column 5 of Table I and being depicted in the same respective line as said Ybr180w or a functional equivalent or a homologue thereof as shown depicted in column 7 of Table I, preferably a homologue or functional equivalent as shown depicted in column 7 of Table I B, and being depicted in the same respective line as said Ybr180w; or
[0140] (b) a polypeptide comprising a polypeptide, a consensus sequence or a polypeptide motif as shown depicted in column 5 of Table II, and being depicted in the same respective line as said Ybr180w or a functional equivalent or a homologue thereof as depicted in column 7 of Table II or IV, preferably a homologue or functional equivalent as depicted in column 7 of Table II B, and being depicted in the same respective line as said Ybr180w,
   as mentioned herein, for the an increased yield, preferably under condition of transient and repetitive abiotic stress as compared to a corresponding non-transformed wild type plant cell, plant or part thereof in plant cell, plant or part thereof, as mentioned. Accordingly, in one embodiment, the molecule which activity is to be increased in the process of the invention is the gene product with an activity of described as a “dityrosine transporter”, preferably it is the molecule of section (a) or (b) of this paragraph. In one embodiment, said molecule, which activity is to be increased in the process of the invention and which is the gene product with an activity of described as a “dityrosine transporter”, is increased cytoplasmic.
   The sequence of Ydr284c from Saccharomyces cerevisiae, e.g. as shown in column 5 of Table I, [sequences from Saccharomyces cerevisiae has been published in Goffeau et al., Science 274 (5287), 546-547, 1996, sequences from Escherichia coli has been published in Blattner et al., Science 277 (5331), 1453-1474 (1997), and its activity is published described as diacylglycerol pyrophosphate phosphatase.
   Accordingly, in one embodiment, the process of the present invention comprises increasing or generating the activity of a gene product with the activity of a “diacylglycerol pyrophosphate phosphatase” from Saccharomyces cerevisiae or its functional equivalent or its homolog, e.g. the increase of
[0141] (a) a gene product of a gene comprising the nucleic acid molecule as shown in column 5 of Table I and being depicted in the same respective line as said Ydr284c or a functional equivalent or a homologue thereof as shown depicted in column 7 of Table I, preferably a homologue or functional equivalent as shown depicted in column 7 of Table I B, and being depicted in the same respective line as said Ydr284c; or
[0142] (b) a polypeptide comprising a polypeptide, a consensus sequence or a polypeptide motif as shown depicted in column 5 of Table II, and being depicted in the same respective line as said Ydr284c or a functional equivalent or a homologue thereof as depicted in column 7 of Table II or IV, preferably a homologue or functional equivalent as depicted in column 7 of Table II B, and being depicted in the same respective line as said Ydr284c,
   as mentioned herein, for the an increased yield, preferably under condition of transient and repetitive abiotic stress as compared to a corresponding non-transformed wild type plant cell, plant or part thereof in plant cell, plant or part thereof, as mentioned. Accordingly, in one embodiment, the molecule which activity is to be increased in the process of the invention is the gene product with an activity of described as a “diacylglycerol pyrophosphate phosphatase”, preferably it is the molecule of section (a) or (b) of this paragraph.
   In one embodiment, said molecule, which activity is to be increased in the process of the invention and which is the gene product with an activity of described as a “diacylglycerol pyrophosphate phosphatase”, is increased cytoplasmic.

[0143] The sequence of Ydr445c from Saccharomyces cerevisiae, e.g. as shown in column 5 of Table I, [sequences from Saccharomyces cerevisiae has been published in Goffeau et al., Science 274 (5287), 546-547, 1996, sequences from Escherichia coli has been published in Blattner et al., Science 277 (5331), 1453-1474 (1997), and its activity is published described as ydr445c-protein.

Accordingly, in one embodiment, the process of the present invention comprises increasing or generating the activity of a gene product with the activity of a “ydr445c-protein” from Saccharomyces cerevisiae or its functional equivalent or its homolog, e.g. the increase of
[0144] (a) a gene product of a gene comprising the nucleic acid molecule as shown in column 5 of Table I and being depicted in the same respective line as said Ydr445c or a functional equivalent or a homologue thereof as shown depicted in column 7 of Table I, preferably a homologue or functional equivalent as shown depicted in column 7 of Table I B, and being depicted in the same respective line as said Ydr445c; or
[0145] (b) a polypeptide comprising a polypeptide, a consensus sequence or a polypeptide motif as shown depicted in column 5 of Table II, and being depicted in the same respective line as said Ydr445c or a functional equivalent or a homologue thereof as depicted in column 7 of Table II or IV, preferably a homologue or functional equivalent as depicted in column 7 of Table II B, and being depicted in the same respective line as said Ydr445c,
   as mentioned herein, for the an increased yield, preferably under condition of transient and repetitive abiotic stress as compared to a corresponding non-transformed wild type plant cell, plant or part thereof in plant cell, plant or part thereof, as mentioned. Accordingly, in one embodiment, the molecule which activity is to be increased in the process of the invention is the gene product with an activity of described as a “ydr445c-protein”, preferably it is the molecule of section (a) or (b) of this paragraph.
   In one embodiment, said molecule, which activity is to be increased in the process of the invention and which is the gene product with an activity of described as a “ydr445c-protein”, is increased cytoplasmic.
   The sequence of Yhr047c from Saccharomyces cerevisiae, e.g. as shown in column 5 of Table I, [sequences from Saccharomyces cerevisiae has been published in Goffeau et al., Science 274 (5287), 546-547, 1996, sequences from Escherichia coli has been published in Blattner et al., Science 277 (5331), 1453-1474 (1997), and its activity is published described as arginine/alanine aminopeptidase.
   Accordingly, in one embodiment, the process of the present invention comprises increasing or generating the activity of a gene product with the activity of a “arginine/alanine aminopeptidase” from Saccharomyces cerevisiae or its functional equivalent or its homolog, e.g. the increase of
[0146] (a) a gene product of a gene comprising the nucleic acid molecule as shown in column 5 of Table I and being depicted in the same respective line as said Yhr047c or a functional equivalent or a homologue thereof as shown depicted in column 7 of Table I, preferably a homologue or functional equivalent as shown depicted in column 7 of Table I B, and being depicted in the same respective line as said Yhr047c; or
[0147] (b) a polypeptide comprising a polypeptide, a consensus sequence or a polypeptide motif as shown depicted in column 5 of Table II, and being depicted in the same respective line as said Yhr047c or a functional equivalent or a homologue thereof as depicted in column 7 of Table II or IV, preferably a homologue or functional equivalent as depicted in column 7 of Table II B, and being depicted in the same respective line as said Yhr047c,
   as mentioned herein, for the an increased yield, preferably under condition of transient and repetitive abiotic stress as compared to a corresponding non-transformed wild type plant cell, plant or part thereof in plant cell, plant or part thereof, as mentioned. Accordingly, in one embodiment, the molecule which activity is to be increased in the process of the invention is the gene product with an activity of described as a “arginine/alanine aminopeptidase”, preferably it is the molecule of section (a) or (b) of this paragraph.
   In one embodiment, said molecule, which activity is to be increased in the process of the invention and which is the gene product with an activity of described as a “arginine/alanine aminopeptidase”, is increased cytoplasmic.
   The sequence of Yhr190w from Saccharomyces cerevisiae, e.g. as shown in column 5 of Table I, [sequences from Saccharomyces cerevisiae has been published in Goffeau et al., Science 274 (5287), 546-547, 1996, sequences from Escherichia coli has been published in Blattner et al., Science 277 (5331), 1453-1474 (1997), and its activity is published described as farnesyl-diphosphate farnesyl transferase.
   Accordingly, in one embodiment, the process of the present invention comprises increasing or generating the activity of a gene product with the activity of a “farnesyl-diphosphate farnesyl transferase” from Saccharomyces cerevisiae or its functional equivalent or its homolog, e.g. the increase of
[0148] (a) a gene product of a gene comprising the nucleic acid molecule as shown in column 5 of Table I and being depicted in the same respective line as said Yhr190w or a functional equivalent or a homologue thereof as shown depicted in column 7 of Table I, preferably a homologue or functional equivalent as shown depicted in column 7 of Table I B, and being depicted in the same respective line as said Yhr190w; or
[0149] (b) a polypeptide comprising a polypeptide, a consensus sequence or a polypeptide motif as shown depicted in column 5 of Table II, and being depicted in the same respective line as said Yhr190w or a functional equivalent or a homologue thereof as depicted in column 7 of Table II or IV, preferably a homologue or functional equivalent as depicted in column 7 of Table II B, and being depicted in the same respective line as said Yhr190w,
   as mentioned herein, for the an increased yield, preferably under condition of transient and repetitive abiotic stress as compared to a corresponding non-transformed wild type plant cell, plant or part thereof in plant cell, plant or part thereof, as mentioned. Accordingly, in one embodiment, the molecule which activity is to be increased in the process of the invention is the gene product with an activity of described as a “farnesyl-diphosphate farnesyl transferase”, preferably it is the molecule of section (a) or (b) of this paragraph.
   In one embodiment, said molecule, which activity is to be increased in the process of the invention and which is the gene product with an activity of described as a “farnesyl-diphosphate farnesyl transferase”, is increased plastidic.
   The sequence of Ykl094w from Saccharomyces cerevisiae, e.g. as shown in column 5 of Table I, [sequences from Saccharomyces cerevisiae has been published in Goffeau et al., Science 274 (5287), 546-547, 1996, sequences from Escherichia coli has been published in Blattner et al., Science 277 (5331), 1453-1474 (1997), and its activity is published described as serine hydrolase.
   Accordingly, in one embodiment, the process of the present invention comprises increasing or generating the activity of a gene product with the activity of a “serine hydrolase” from Saccharomyces cerevisiae or its functional equivalent or its homolog, e.g. the increase of
[0150] (a) a gene product of a gene comprising the nucleic acid molecule as shown in column 5 of Table I and being depicted in the same respective line as said Ykl094w or a functional equivalent or a homologue thereof as shown depicted in column 7 of Table I, preferably a homologue or functional equivalent as shown depicted in column 7 of Table I B, and being depicted in the same respective line as said Ykl094w; or
[0151] (b) a polypeptide comprising a polypeptide, a consensus sequence or a polypeptide motif as shown depicted in column 5 of Table II, and being depicted in the same respective line as said Ykl094w or a functional equivalent or a homologue thereof as depicted in column 7 of Table II or IV, preferably a homologue or functional equivalent as depicted in column 7 of Table II B, and being depicted in the same respective line as said Ykl094w,
   as mentioned herein, for the an increased yield, preferably under condition of transient and repetitive abiotic stress as compared to a corresponding non-transformed wild type plant cell, plant or part thereof in plant cell, plant or part thereof, as mentioned. Accordingly, in one embodiment, the molecule which activity is to be increased in the process of the invention is the gene product with an activity of described as a “serine hydrolase”, preferably it is the molecule of section (a) or (b) of this paragraph.
   In one embodiment, said molecule, which activity is to be increased in the process of the invention and which is the gene product with an activity of described as a “serine hydrolase”, is increased cytoplasmic.
   The sequence of Ykr097w from Saccharomyces cerevisiae, e.g. as shown in column 5 of Table I, [sequences from Saccharomyces cerevisiae has been published in Goffeau et al., Science 274 (5287), 546-547, 1996, sequences from Escherichia coli has been published in Blattner et al., Science 277 (5331), 1453-1474 (1997), and its activity is published described as phosphoenolpyruvate carboxylkinase.
   Accordingly, in one embodiment, the process of the present invention comprises increasing or generating the activity of a gene product with the activity of a “phosphoenolpyruvate carboxylkinase” from Saccharomyces cerevisiae or its functional equivalent or its homolog, e.g. the increase of
[0152] (a) a gene product of a gene comprising the nucleic acid molecule as shown in column 5 of Table I and being depicted in the same respective line as said Ykr097w or a functional equivalent or a homologue thereof as shown depicted in column 7 of Table I, preferably a homologue or functional equivalent as shown depicted in column 7 of Table I B, and being depicted in the same respective line as said Ykr097w; or
[0153] (b) a polypeptide comprising a polypeptide, a consensus sequence or a polypeptide motif as shown depicted in column 5 of Table II, and being depicted in the same respective line as said Ykr097w or a functional equivalent or a homologue thereof as depicted in column 7 of Table II or IV, preferably a homologue or functional equivalent as depicted in column 7 of Table II B, and being depicted in the same respective line as said Ykr097w,
   as mentioned herein, for the an increased yield, preferably under condition of transient and repetitive abiotic stress as compared to a corresponding non-transformed wild type plant cell, plant or part thereof in plant cell, plant or part thereof, as mentioned. Accordingly, in one embodiment, the molecule which activity is to be increased in the process of the invention is the gene product with an activity of described as a “phosphoenolpyruvate carboxylkinase”, preferably it is the molecule of section (a) or (b) of this paragraph.
   In one embodiment, said molecule, which activity is to be increased in the process of the invention and which is the gene product with an activity of described as a “phosphoenolpyruvate carboxylkinase”, is increased cytoplasmic.
   The sequence of Ynr012w from Saccharomyces cerevisiae, e.g. as shown in column 5 of Table I, [sequences from Saccharomyces cerevisiae has been published in Goffeau et al., Science 274 (5287), 546-547, 1996, sequences from Escherichia coli has been published in Blattner et al., Science 277 (5331), 1453-1474 (1997), and its activity is published described as uridine kinase.
   Accordingly, in one embodiment, the process of the present invention comprises increasing or generating the activity of a gene product with the activity of a “uridine kinase” from Saccharomyces cerevisiae or its functional equivalent or its homolog, e.g. the increase of
[0154] (a) a gene product of a gene comprising the nucleic acid molecule as shown in column 5 of Table I and being depicted in the same respective line as said Ynr012w or a functional equivalent or a homologue thereof as shown depicted in column 7 of Table I, preferably a homologue or functional equivalent as shown depicted in column 7 of Table I B, and being depicted in the same respective line as said Ynr012w; or
[0155] (b) a polypeptide comprising a polypeptide, a consensus sequence or a polypeptide motif as shown depicted in column 5 of Table II, and being depicted in the same respective line as said Ynr012w or a functional equivalent or a homologue thereof as depicted in column 7 of Table II or IV, preferably a homologue or functional equivalent as depicted in column 7 of Table II B, and being depicted in the same respective line as said Ynr012w,
   as mentioned herein, for the an increased yield, preferably under condition of transient and repetitive abiotic stress as compared to a corresponding non-transformed wild type plant cell, plant or part thereof in plant cell, plant or part thereof, as mentioned. Accordingly, in one embodiment, the molecule which activity is to be increased in the process of the invention is the gene product with an activity of described as a “uridine kinase”, preferably it is the molecule of section (a) or (b) of this paragraph.
   In one embodiment, said molecule, which activity is to be increased in the process of the invention and which is the gene product with an activity of described as a “uridine kinase”, is increased cytoplasmic.
   The sequence of Ypl133c from Saccharomyces cerevisiae, e.g. as shown in column 5 of Table I, [sequences from Saccharomyces cerevisiae has been published in Goffeau et al., Science 274 (5287), 546-547, 1996, sequences from Escherichia coli has been published in Blattner et al., Science 277 (5331), 1453-1474 (1997), and its activity is published described as transcriptional regulator involved in conferring resistance to ketoconazole.
   Accordingly, in one embodiment, the process of the present invention comprises increasing or generating the activity of a gene product with the activity of a “transcriptional regulator involved in conferring resistance to ketoconazole” from Saccharomyces cerevisiae or its functional equivalent or its homolog, e.g. the increase of
[0156] (a) a gene product of a gene comprising the nucleic acid molecule as shown in column 5 of Table I and being depicted in the same respective line as said Ypl133c or a functional equivalent or a homologue thereof as shown depicted in column 7 of Table I, preferably a homologue or functional equivalent as shown depicted in column 7 of Table I B, and being depicted in the same respective line as said Ypl133c; or
[0157] (b) a polypeptide comprising a polypeptide, a consensus sequence or a polypeptide motif as shown depicted in column 5 of Table II, and being depicted in the same respective line as said Ypl133c or a functional equivalent or a homologue thereof as depicted in column 7 of Table II or IV, preferably a homologue or functional equivalent as depicted in column 7 of Table II B, and being depicted in the same respective line as said Ypl133c,
   as mentioned herein, for the an increased yield, preferably under condition of transient and repetitive abiotic stress as compared to a corresponding non-transformed wild type plant cell, plant or part thereof in plant cell, plant or part thereof, as mentioned. Accordingly, in one embodiment, the molecule which activity is to be increased in the process of the invention is the gene product with an activity of described as a “transcriptional regulator involved in conferring resistance to ketoconazole”, preferably it is the molecule of section (a) or (b) of this paragraph.
   In one embodiment, said molecule, which activity is to be increased in the process of the invention and which is the gene product with an activity of described as a “transcriptional regulator involved in conferring resistance to ketoconazole”, is increased plastidic.

[0158] It was observed that increasing or generating the activity of a YRP gene shown in Table VIIIa, e.g. a nucleic acid molecule derived from the nucleic acid molecule shown in Table VIIIa in A. thaliana conferred increased nutrient use efficiency, e.g. an increased the nitrogen use efficiency, compared to the wild type control. Thus, in one embodiment, a nucleic acid molecule indicated in Table VIIIa or its homolog as indicated in Table I or the expression product is used in the method of the present invention to increased nutrient use efficiency, e.g. to increased the nitrogen use efficiency, of the a plant compared to the wild type control.

[0159] It was further observed that increasing or generating the activity of a YRP gene shown in Table VIIIb, e.g. a nucleic acid molecule derived from the nucleic acid molecule shown in Table VIIIb in A. thaliana conferred increased stress tolerance, e.g. increased low temperature tolerance, compared to the wild type control. Thus, in one embodiment, a nucleic acid molecule indicated in Table VIIIb or its homolog as indicated in Table I or the expression product is used in the method of the present invention to increase stress tolerance, e.g. increase low temperature, of a plant compared to the wild type control.

[0160] It was further observed that increasing or generating the activity of a YRP gene shown in Table VIIIc, e.g. a nucleic acid molecule derived from the nucleic acid molecule shown in Table VIIIc in A. thaliana conferred increased stress tolerance, e.g. increased cycling drought tolerance, compared to the wild type control. Thus, in one embodiment, a nucleic acid molecule indicated in Table VIIIc or its homolog as indicated in Table I or the expression product is used in the method of the present invention to increase stress tolerance, e.g. increase cycling drought tolerance, of a plant compared to the wild type control.

[0161] It was further observed that increasing or generating the activity of a YRP gene shown in Table VIIId, e.g. a nucleic acid molecule derived from the nucleic acid molecule shown in Table VIIId in A. thaliana conferred increase in intrinsic yield, e.g. increased biomass under standard conditions, e.g. increased biomass under non-deficiency or non-stress conditions, compared to the wild type control. Thus, in one embodiment, a nucleic acid molecule indicated in Table VIIId or its homolog as indicated in Table I or the expression product is used in the method of the present invention to increase intrinsic yield, e.g. to increase yield under standard conditions, e.g. increase biomass under non-deficiency or non-stress conditions, of the plant compared to the wild type control.

[0162] Surprisingly, it was observed that a increasing or generating of at least one gene conferring an activity selected from the group consisting of: phosphoenolpyruvate carboxylkinase, arginine/alanine aminopeptidase, D-alanyl-D-alanine carboxypeptidase, diacylglycerol pyrophosphate phosphatase, dityrosine transporter, farnesyl-diphosphate farnesyl transferase, NAD+-dependent betaine aldehyde dehydrogenase, serine hydrolase, transcriptional regulator involved in conferring resistance to ketoconazole, uridine kinase, yal043c-a-protein, ybr071w-protein, and ydr445c-protein or of a gene comprising a nucleic acid sequence described in column 5 of Table I in Arabidopsis thaliana conferred an increased yield, preferably under condition of transient and repetitive abiotic stress in the transformed plants as compared to a corresponding non-transformed wild type plant.

[0163] It was observed that increasing or generating the activity of a gene product with the activity of a “NAD+-dependent betaine aldehyde dehydrogenase” encoded by a gene comprising the nucleic acid sequence SEQ ID NO.: 63 in Arabidopsis thaliana conferred an increased yield, preferably under condition of transient and repetitive abiotic stress compared with the wild type control between 1.1% and 1.577-fold as shown in the Examples.

It was observed that increasing or generating the activity of a gene product with the activity of a “D-alanyl-D-alanine carboxypeptidase” encoded by a gene comprising the nucleic acid sequence SEQ ID NO.: 623 in Arabidopsis thaliana conferred an increased yield, preferably under condition of transient and repetitive abiotic stress compared with the wild type control between 1.1% and 1.200-fold as shown in the Examples.
It was observed that increasing or generating the activity of a gene product with the activity of a “yal043c-a-protein” encoded by a gene comprising the nucleic acid sequence SEQ ID NO.: 724 in Arabidopsis thaliana conferred an increased yield, preferably under condition of transient and repetitive abiotic stress compared with the wild type control between 1.1% and 1.570-fold as shown in the Examples.
It was observed that increasing or generating the activity of a gene product with the activity of a “ybr071w-protein” encoded by a gene comprising the nucleic acid sequence SEQ ID NO.: 728 in Arabidopsis thaliana conferred an increased yield, preferably under condition of transient and repetitive abiotic stress compared with the wild type control between 1.1% and 1.673-fold as shown in the Examples.
It was observed that increasing or generating the activity of a gene product with the activity of a “dityrosine transporter” encoded by a gene comprising the nucleic acid sequence SEQ ID NO.: 732 in Arabidopsis thaliana conferred an increased yield, preferably under condition of transient and repetitive abiotic stress compared with the wild type control between 1.1% and 1.381-fold as shown in the Examples.
It was observed that increasing or generating the activity of a gene product with the activity of a “diacylglycerol pyrophosphate phosphatase” encoded by a gene comprising the nucleic acid sequence SEQ ID NO.: 764 in Arabidopsis thaliana conferred an increased yield, preferably under condition of transient and repetitive abiotic stress compared with the wild type control between 1.1% and 1.381-fold as shown in the Examples.
It was observed that increasing or generating the activity of a gene product with the activity of a “ydr445c-protein” encoded by a gene comprising the nucleic acid sequence SEQ ID NO.: 814 in Arabidopsis thaliana conferred an increased yield, preferably under condition of transient and repetitive abiotic stress compared with the wild type control between 1.1% and 1.299-fold as shown in the Examples.
It was observed that increasing or generating the activity of a gene product with the activity of a “arginine/alanine aminopeptidase” encoded by a gene comprising the nucleic acid sequence SEQ ID NO.: 818 in Arabidopsis thaliana conferred an increased yield, preferably under condition of transient and repetitive abiotic stress compared with the wild type control between 1.1% and 1.320-fold as shown in the Examples.
It was observed that increasing or generating the activity of a gene product with the activity of a “farnesyl-diphosphate farnesyl transferase” encoded by a gene comprising the nucleic acid sequence SEQ ID NO.: 925 in Arabidopsis thaliana conferred an increased yield, preferably under condition of transient and repetitive abiotic stress compared with the wild type control between 1.1% and 1.550-fold as shown in the Examples.
It was observed that increasing or generating the activity of a gene product with the activity of a “serine hydrolase” encoded by a gene comprising the nucleic acid sequence SEQ ID NO.: 1021 in Arabidopsis thaliana conferred an increased yield, preferably under condition of transient and repetitive abiotic stress compared with the wild type control between 1.1% and 1.408-fold as shown in the Examples.
It was observed that increasing or generating the activity of a gene product with the activity of a “phosphoenolpyruvate carboxylkinase” encoded by a gene comprising the nucleic acid sequence SEQ ID NO.: 1157 in Arabidopsis thaliana conferred an increased yield, preferably under condition of transient and repetitive abiotic stress compared with the wild type control between 1.1% and 1.698-fold as shown in the Examples.
It was observed that increasing or generating the activity of a gene product with the activity of a “uridine kinase” encoded by a gene comprising the nucleic acid sequence SEQ ID NO.: 1352 in Arabidopsis thaliana conferred an increased yield, preferably under condition of transient and repetitive abiotic stress compared with the wild type control between 1.1% and 1.377-fold as shown in the Examples.
It was observed that increasing or generating the activity of a gene product with the activity of a “transcriptional regulator involved in conferring resistance to ketoconazole” encoded by a gene comprising the nucleic acid sequence SEQ ID NO.: 1423 in Arabidopsis thaliana conferred an increased yield, preferably under condition of transient and repetitive abiotic stress compared with the wild type control between 1.1% and 1.500-fold as shown in the Examples.

[0164] Thus, according to the method of the invention for an increased yield under condition of transient and repetitive abiotic stress in a plant cell, plant or a part thereof compared to a control or wild type can be achieved.

Accordingly, in one embodiment, in case the activity of a polypeptide according to the polypeptide SEQ ID NO.: 64, or encoded by a nucleic acid molecule comprising the nucleic acid SEQ ID NO.: 63 or a homolog of said nucleic acid molecule or polypeptide, e.g. if the activity of a nucleic acid molecule or a polypeptide comprising the nucleic acid or polypeptide or the consensus sequence or the polypeptide motif, as depicted in Table I, II or IV, column 7 in the respective same line as the nucleic acid molecule SEQ ID NO.: 63 or polypeptide SEQ ID NO.: 64, respectively is increased or generated or if the activity “NAD+-dependent betaine aldehyde dehydrogenase” is increased or generated in an organism, preferably
an increased yield, preferably under condition of transient and repetitive abiotic stress compared with the wild type control between 1.1% and 1.577-fold is conferred in said organism.
Accordingly, in one embodiment, in case the activity of a polypeptide according to the polypeptide SEQ ID NO.: 624, or encoded by a nucleic acid molecule comprising the nucleic acid SEQ ID NO.: 623 or a homolog of said nucleic acid molecule or polypeptide, e.g. if the activity of a nucleic acid molecule or a polypeptide comprising the nucleic acid or polypeptide or the consensus sequence or the polypeptide motif, as depicted in Table I, II or IV, column 7 in the respective same line as the nucleic acid molecule SEQ ID NO.: 623 or polypeptide SEQ ID NO.: 624, respectively is increased or generated or if the activity “D-alanyl-D-alanine carboxypeptidase” is increased or generated in an organism, preferably
an increased yield, preferably under condition of transient and repetitive abiotic stress compared with the wild type control between 1.1% and 1.200-fold is conferred in said organism.
Accordingly, in one embodiment, in case the activity of a polypeptide according to the polypeptide SEQ ID NO.: 725, or encoded by a nucleic acid molecule comprising the nucleic acid SEQ ID NO.: 724 or a homolog of said nucleic acid molecule or polypeptide, e.g. if the activity of a nucleic acid molecule or a polypeptide comprising the nucleic acid or polypeptide or the consensus sequence or the polypeptide motif, as depicted in Table I, II or IV, column 7 in the respective same line as the nucleic acid molecule SEQ ID NO.: 724 or polypeptide SEQ ID NO.: 725, respectively is increased or generated or if the activity “yal043c-a-protein” is increased or generated in an organism, preferably
an increased yield, preferably under condition of transient and repetitive abiotic stress compared with the wild type control between 1.1% and 1.570-fold is conferred in said organism.
Accordingly, in one embodiment, in case the activity of a polypeptide according to the polypeptide SEQ ID NO.: 729, or encoded by a nucleic acid molecule comprising the nucleic acid SEQ ID NO.: 728 or a homolog of said nucleic acid molecule or polypeptide, e.g. if the activity of a nucleic acid molecule or a polypeptide comprising the nucleic acid or polypeptide or the consensus sequence or the polypeptide motif, as depicted in Table I, 11 or IV, column 7 in the respective same line as the nucleic acid molecule SEQ ID NO.: 728 or polypeptide SEQ ID NO.: 729, respectively is increased or generated or if the activity “ybr071w-protein” is increased or generated in an organism, preferably
an increased yield, preferably under condition of transient and repetitive abiotic stress compared with the wild type control between 1.1% and 1.673-fold is conferred in said organism.
Accordingly, in one embodiment, in case the activity of a polypeptide according to the polypeptide SEQ ID NO.: 733, or encoded by a nucleic acid molecule comprising the nucleic acid SEQ ID NO.: 732 or a homolog of said nucleic acid molecule or polypeptide, e.g. if the activity of a nucleic acid molecule or a polypeptide comprising the nucleic acid or polypeptide or the consensus sequence or the polypeptide motif, as depicted in Table I, II or IV, column 7 in the respective same line as the nucleic acid molecule SEQ ID NO.: 732 or polypeptide SEQ ID NO.: 733, respectively is increased or generated or if the activity “dityrosine transporter” is increased or generated in an organism, preferably
an increased yield, preferably under condition of transient and repetitive abiotic stress compared with the wild type control between 1.1% and 1.381-fold is conferred in said organism.
Accordingly, in one embodiment, in case the activity of a polypeptide according to the polypeptide SEQ ID NO.: 765, or encoded by a nucleic acid molecule comprising the nucleic acid SEQ ID NO.: 764 or a homolog of said nucleic acid molecule or polypeptide, e.g. if the activity of a nucleic acid molecule or a polypeptide comprising the nucleic acid or polypeptide or the consensus sequence or the polypeptide motif, as depicted in Table I, II or IV, column 7 in the respective same line as the nucleic acid molecule SEQ ID NO.: 764 or polypeptide SEQ ID NO.: 765, respectively is increased or generated or if the activity “diacylglycerol pyrophosphate phosphatase” is increased or generated in an organism, preferably
an increased yield, preferably under condition of transient and repetitive abiotic stress compared with the wild type control between 1.1% and 1.381-fold is conferred in said organism.
Accordingly, in one embodiment, in case the activity of a polypeptide according to the polypeptide SEQ ID NO.: 815, or encoded by a nucleic acid molecule comprising the nucleic acid SEQ ID NO.: 814 or a homolog of said nucleic acid molecule or polypeptide, e.g. if the activity of a nucleic acid molecule or a polypeptide comprising the nucleic acid or polypeptide or the consensus sequence or the polypeptide motif, as depicted in Table I, II or IV, column 7 in the respective same line as the nucleic acid molecule SEQ ID NO.: 814 or polypeptide SEQ ID NO.: 815, respectively is increased or generated or if the activity “ydr445c-protein” is increased or generated in an organism, preferably
an increased yield, preferably under condition of transient and repetitive abiotic stress compared with the wild type control between 1.1% and 1.299-fold is conferred in said organism.
Accordingly, in one embodiment, in case the activity of a polypeptide according to the polypeptide SEQ ID NO.: 819, or encoded by a nucleic acid molecule comprising the nucleic acid SEQ ID NO.: 818 or a homolog of said nucleic acid molecule or polypeptide, e.g. if the activity of a nucleic acid molecule or a polypeptide comprising the nucleic acid or polypeptide or the consensus sequence or the polypeptide motif, as depicted in Table I, II or IV, column 7 in the respective same line as the nucleic acid molecule SEQ ID NO.: 818 or polypeptide SEQ ID NO.: 819, respectively is increased or generated or if the activity “arginine/alanine aminopeptidase” is increased or generated in an organism, preferably
an increased yield, preferably under condition of transient and repetitive abiotic stress compared with the wild type control between 1.1% and 1.320-fold is conferred in said organism.
Accordingly, in one embodiment, in case the activity of a polypeptide according to the polypeptide SEQ ID NO.: 926, or encoded by a nucleic acid molecule comprising the nucleic acid SEQ ID NO.: 925 or a homolog of said nucleic acid molecule or polypeptide, e.g. if the activity of a nucleic acid molecule or a polypeptide comprising the nucleic acid or polypeptide or the consensus sequence or the polypeptide motif, as depicted in Table I, II or IV, column 7 in the respective same line as the nucleic acid molecule SEQ ID NO.: 925 or polypeptide SEQ ID NO.: 926, respectively is increased or generated or if the activity “farnesyl-diphosphate farnesyl transferase” is increased or generated in an organism, preferably
an increased yield, preferably under condition of transient and repetitive abiotic stress compared with the wild type control between 1.1% and 1.550-fold is conferred in said organism.
Accordingly, in one embodiment, in case the activity of a polypeptide according to the polypeptide SEQ ID NO.: 1022, or encoded by a nucleic acid molecule comprising the nucleic acid SEQ ID NO.: 1021 or a homolog of said nucleic acid molecule or polypeptide, e.g. if the activity of a nucleic acid molecule or a polypeptide comprising the nucleic acid or polypeptide or the consensus sequence or the polypeptide motif, as depicted in Table I, II or IV, column 7 in the respective same line as the nucleic acid molecule SEQ ID NO.: 1021 or polypeptide SEQ ID NO.: 1022, respectively is increased or generated or if the activity “serine hydrolase” is increased or generated in an organism, preferably
an increased yield, preferably under condition of transient and repetitive abiotic stress compared with the wild type control between 1.1% and 1.408-fold is conferred in said organism.
Accordingly, in one embodiment, in case the activity of a polypeptide according to the polypeptide SEQ ID NO.: 1158, or encoded by a nucleic acid molecule comprising the nucleic acid SEQ ID NO.: 1157 or a homolog of said nucleic acid molecule or polypeptide, e.g. if the activity of a nucleic acid molecule or a polypeptide comprising the nucleic acid or polypeptide or the consensus sequence or the polypeptide motif, as depicted in Table I, II or IV, column 7 in the respective same line as the nucleic acid molecule SEQ ID NO.: 1157 or polypeptide SEQ ID NO.: 1158, respectively is increased or generated or if the activity “phosphoenolpyruvate carboxylkinase” is increased or generated in an organism, preferably
an increased yield, preferably under condition of transient and repetitive abiotic stress compared with the wild type control between 1.1% and 1.698-fold is conferred in said organism.
Accordingly, in one embodiment, in case the activity of a polypeptide according to the polypeptide SEQ ID NO.: 1353, or encoded by a nucleic acid molecule comprising the nucleic acid SEQ ID NO.: 1352 or a homolog of said nucleic acid molecule or polypeptide, e.g. if the activity of a nucleic acid molecule or a polypeptide comprising the nucleic acid or polypeptide or the consensus sequence or the polypeptide motif, as depicted in Table I, II or IV, column 7 in the respective same line as the nucleic acid molecule SEQ ID NO.: 1352 or polypeptide SEQ ID NO.: 1353, respectively is increased or generated or if the activity “uridine kinase” is increased or generated in an organism, preferably
an increased yield, preferably under condition of transient and repetitive abiotic stress compared with the wild type control between 1.1% and 1.377-fold is conferred in said organism.
Accordingly, in one embodiment, in case the activity of a polypeptide according to the polypeptide SEQ ID NO.: 1424, or encoded by a nucleic acid molecule comprising the nucleic acid SEQ ID NO.: 1423 or a homolog of said nucleic acid molecule or polypeptide, e.g. if the activity of a nucleic acid molecule or a polypeptide comprising the nucleic acid or polypeptide or the consensus sequence or the polypeptide motif, as depicted in Table I, II or IV, column 7 in the respective same line as the nucleic acid molecule SEQ ID NO.: 1423 or polypeptide SEQ ID NO.: 1424, respectively is increased or generated or if the activity “transcriptional regulator involved in conferring resistance to ketoconazole” is increased or generated in an organism, preferably an increased yield, preferably under condition of transient and repetitive abiotic stress compared with the wild type control between 1.1% and 1.500-fold is conferred in said organism.

[0165] The term “expression” refers to the transcription and/or translation of a codogenic gene segment or gene. As a rule, the resulting product is an mRNA or a protein. However, expression products can also include functional RNAs such as, for example, antisense, nucleic acids, tRNAs, snRNAs, rRNAs, RNAi, siRNA, ribozymes etc. Expression may be systemic, local or temporal, for example limited to certain cell types, tissues organs or organelles or time periods.

[0166] In one embodiment, the process of the present invention comprises one or more of the following steps

a) stabilizing a protein conferring the increased expression of a protein encoded by the nucleic acid molecule of the invention or of the polypeptide of the invention having the herein-mentioned activity selected from the group consisting of phosphoenolpyruvate carboxylkinase, arginine/alanine aminopeptidase, D-alanyl-D-alanine carboxypeptidase, diacylglycerol pyrophosphate phosphatase, dityrosine transporter, farnesyl-diphosphate farnesyl transferase, NAD+-dependent betaine aldehyde dehydrogenase, serine hydrolase, transcriptional regulator involved in conferring resistance to ketoconazole, uridine kinase, yal043c-a-protein, ybr071w-protein, and ydr445c-protein and conferring an increased yield, preferably under condition of transient and repetitive abiotic stress as compared to a corresponding non-transformed wild type plant cell, plant or part thereof;
b) stabilizing a mRNA conferring the increased expression of a YRP, e.g. encoding a polypeptide as mentioned in (a);
c) increasing the specific activity of a protein conferring the increased expression of a YRP, e.g. encoding a polypeptide as mentioned in (a);
d) generating or increasing the expression of an endogenous or artificial transcription factor mediating the expression of a YRP, e.g. encoding a polypeptide as mentioned in (a);
e) stimulating activity of a protein conferring the increased expression of a YRP, e.g. encoding a polypeptide as mentioned in (a);
f) expressing a transgenic gene encoding a protein conferring the increased expression of a YRP, e.g. encoding a polypeptide as mentioned in (a); and/or
g) increasing the copy number of a gene conferring the increased expression of a YRP, e.g. encoding a polypeptide as mentioned in (a);
h) increasing the expression of the endogenous gene encoding the YRP, e.g. a polypeptide as mentioned in (a) by adding positive expression or removing negative expression elements, e.g. homologous recombination can be used to either introduce positive regulatory elements like for plants the 35S enhancer into the promoter or to remove repressor elements form regulatory regions. Further gene conversion methods can be used to disrupt repressor elements or to enhance to activity of positive elements—positive elements can be randomly introduced in plants by T-DNA or transposon mutagenesis and lines can be identified in which the positive elements have been integrated near to a gene of the invention, the expression of which is thereby enhanced; and/or
i) modulating growth conditions of the plant in such a manner, that the expression or activity of the YRP, e.g. encoding a polypeptide as mentioned in (a) or the protein itself is enhanced;
j) selecting of organisms with especially high activity of the YRP, e.g. encoding a polypeptide as mentioned in (a) from natural or from mutagenized resources and breeding them into the target organisms, e.g. the elite crops.

[0167] Preferably, said mRNA is the nucleic acid molecule of the present invention and/or the protein conferring the increased expression of a protein encoded by the nucleic acid molecule of the present invention alone or linked to a transit nucleic acid sequence or transit peptide encoding nucleic acid sequence or the polypeptide having the herein mentioned activity, e.g. conferring an increased yield, preferably under condition of transient and repetitive abiotic stress as compared to a corresponding non-transformed wild type plant cell, plant or part thereof after increasing the expression or activity of the encoded polypeptide or having the activity of a polypeptide having an activity as the protein as shown in table II column 3 or its homologs.

[0168] In general, the amount of mRNA or polypeptide in a cell or a compartment of an organism correlates with the amount of encoded protein and thus with the overall activity of the encoded protein in said volume. Said correlation is not always linear, the activity in the volume is dependent on the stability of the molecules or the presence of activating or inhibiting co-factors. Further, product and educt inhibitions of enzymes are well known and described in textbooks, e.g. Stryer, Biochemistry.

[0169] In general, the amount of mRNA, polynucleotide or nucleic acid molecule in a cell or a compartment of an organism correlates with the amount of encoded protein and thus with the overall activity of the encoded protein in said volume. Said correlation is not always linear, the activity in the volume is dependent on the stability of the molecules, the degradation of the molecules or the presence of activating or inhibiting co-factors. Further, product and educt inhibitions of enzymes are well known, e.g. Zinser et al. “Enzyminhibitoren”/Enzyme inhibitors”.

[0170] The activity of the abovementioned proteins and/or polypeptides encoded by the nucleic acid molecule of the present invention can be increased in various ways. For example, the activity in an organism or in a part thereof, like a cell, is increased via increasing the gene product number, e.g. by increasing the expression rate, like introducing a stronger promoter, or by increasing the stability of the mRNA expressed, thus increasing the translation rate, and/or increasing the stability of the gene product, thus reducing the proteins decayed. Further, the activity or turnover of enzymes can be influenced in such a way that a reduction or increase of the reaction rate or a modification (reduction or increase) of the affinity to the substrate results, is reached. A mutation in the catalytic center of an polypeptide of the invention, e.g. as enzyme, can modulate the turn over rate of the enzyme, e.g. a knock out of an essential amino acid can lead to a reduced or completely knock out activity of the enzyme, or the deletion or mutation of regulator binding sites can reduce a negative regulation like a feedback inhibition (or a substrate inhibition, if the substrate level is also increased). The specific activity of an enzyme of the present invention can be increased such that the turn over rate is increased or the binding of a co-factor is improved. Improving the stability of the encoding mRNA or the protein can also increase the activity of a gene product. The stimulation of the activity is also under the scope of the term “increased activity”.

[0171] Moreover, the regulation of the abovementioned nucleic acid sequences may be modified so that gene expression is increased. This can be achieved advantageously by means of heterologous regulatory sequences or by modifying, for example mutating, the natural regulatory sequences which are present. The advantageous methods may also be combined with each other.

[0172] In general, an activity of a gene product in an organism or part thereof, in particular in a plant cell or organelle of a plant cell, a plant, or a plant tissue or a part thereof or in a microorganism can be increased by increasing the amount of the specific encoding mRNA or the corresponding protein in said organism or part thereof. “Amount of protein or mRNA” is understood as meaning the molecule number of polypeptides or mRNA molecules in an organism, a tissue, a cell or a cell compartment. “Increase” in the amount of a protein means the quantitative increase of the molecule number of said protein in an organism, a tissue, a cell or a cell compartment such as an organelle like a plastid or mitochondria or part thereof—for example by one of the methods described herein below—in comparison to a wild type, control or reference.

[0173] The increase in molecule number amounts preferably to at least 1%, preferably to more than 10%, more preferably to 30% or more, especially preferably to 50%, 70% or more, very especially preferably to 100%, most preferably to 500% or more. However, a de novo expression is also regarded as subject of the present invention.

[0174] A modification, i.e. an increase, can be caused by endogenous or exogenous factors. For example, an increase in activity in an organism or a part thereof can be caused by adding a gene product or a precursor or an activator or an agonist to the media or nutrition or can be caused by introducing said subjects into a organism, transient or stable. Furthermore such an increase can be reached by the introduction of the inventive nucleic acid sequence or the encoded protein in the correct cell compartment for example into the, nucleus, or cytoplasm respectively or into plastids either by transformation and/or targeting.

[0175] In one embodiment the increase or decrease in tolerance and/or resistance to environmental stress as compared to a corresponding non-transformed wild type plant cell in the plant or a part thereof, e.g. in a cell, a tissue, a organ, an organelle etc., is achieved by increasing the endogenous level of the polypeptide of the invention. Accordingly, in an embodiment of the present invention, the present invention relates to a process wherein the gene copy number of a gene encoding the polynucleotide or nucleic acid molecule of the invention is increased. Further, the endogenous level of the polypeptide of the invention can for example be increased by modifying the transcriptional or translational regulation of the polypeptide.

[0176] In one embodiment the increased tolerance and/or resistance to environmental stress in the plant or part thereof can be altered by targeted or random mutagenesis of the endogenous genes of the invention. For example homologous recombination can be used to either introduce positive regulatory elements like for plants the 35S enhancer into the promoter or to remove repressor elements form regulatory regions. In addition gene conversion like methods described by Kochevenko and Willmitzer (Plant Physiol. 2003 May; 132(1):174-84) and citations therein can be used to disrupt repressor elements or to enhance to activity of positive regulatory elements. Furthermore positive elements can be randomly introduced in (plant) genomes by T-DNA or transposon mutagenesis and lines can be screened for, in which the positive elements has be integrated near to a gene of the invention, the expression of which is thereby enhanced. The activation of plant genes by random integrations of enhancer elements has been described by Hayashi et al., 1992 (Science 258:1350-1353) or Weigel et al., 2000 (Plant Physiol. 122, 1003-1013) and others citated therein. Reverse genetic strategies to identify insertions (which eventually carrying the activation elements) near in genes of interest have been described for various cases e.g. Krysan et al., 1999 (Plant Cell 1999, 11, 2283-2290); Sessions et al., 2002 (Plant Cell 2002, 14, 2985-2994); Young et al., 2001, (Plant Physiol. 2001, 125, 513-518); Koprek et al., 2000 (Plant J. 2000, 24, 253-263); Jeon et al., 2000 (Plant J. 2000, 22, 561-570); Tissier et al., 1999 (Plant Cell 1999, 11, 1841-1852); Speulmann et al., 1999 (Plant Cell 1999, 11, 1853-1866). Briefly material from all plants of a large T-DNA or transposon mutagenized plant population is harvested and genomic DNA prepared. Then the genomic DNA is pooled following specific architectures as described for example in Krysan et al., 1999 (Plant Cell 1999, 11, 2283-2290). Pools of genomics DNAs are then screened by specific multiplex PCR reactions detecting the combination of the insertional mutagen (eg T-DNA or Transposon) and the gene of interest. Therefore PCR reactions are run on the DNA pools with specific combinations of T-DNA or transposon border primers and gene specific primers. General rules for primer design can again be taken from Krysan et al., 1999 (Plant Cell 1999, 11, 2283-2290) Re-screening of lower levels DNA pools lead to the identification of individual plants in which the gene of interest is activated by the insertional mutagen.

The enhancement of positive regulatory elements or the disruption or weakening of negative regulatory elements can also be achieved through common mutagenesis techniques: The production of chemically or radiation mutated populations is a common technique and known to the skilled worker. Methods for plants are described by Koorneef et al. 1982 and the citations therein and by Lightner and Caspar in “Methods in Molecular Biology” Vol 82. These techniques usually induce point mutations that can be identified in any known gene using methods such as TILLING (Colbert et al. 2001).

[0177] Accordingly, the expression level can be increased if the endogenous genes encoding a polypeptide conferring an increased expression of the polypeptide of the present invention, in particular genes comprising the nucleic acid molecule of the present invention, are modified via homologous recombination, Tilling approaches or gene conversion. It also possible to add as mentioned herein targeting sequences to the inventive nucleic acid sequences.

[0178] Regulatory sequences preferably in addition to a target sequence or part thereof can be operatively linked to the coding region of an endogenous protein and control its transcription and translation or the stability or decay of the encoding mRNA or the expressed protein. In order to modify and control the expression, promoter, UTRs, splicing sites, processing signals, polyadenylation sites, terminators, enhancers, repressors, post transcriptional or posttranslational modification sites can be changed, added or amended. For example, the activation of plant genes by random integrations of enhancer elements has been described by Hayashi et al., 1992 (Science 258:1350-1353) or Weigel et al., 2000 (Plant Physiol. 122, 1003-1013) and others citated therein. For example, the expression level of the endogenous protein can be modulated by replacing the endogenous promoter with a stronger transgenic promoter or by replacing the endogenous 3′UTR with a 3′UTR, which provides more stability without amending the coding region. Further, the transcriptional regulation can be modulated by introduction of an artificial transcription factor as described in the examples. Alternative promoters, terminators and UTR are described below.

[0179] The activation of an endogenous polypeptide having above-mentioned activity, e.g. having the activity of a protein as shown in table II, column 3 or of the polypeptide of the invention, e.g. conferring the increased yield, preferably under condition of transient and repetitive abiotic stress as compared to a corresponding non-transformed wild type plant cell, plant or part thereof after increase of expression or activity in the cytosol and/or in an organelle like a plastid, can also be increased by introducing a synthetic transcription factor, which binds close to the coding region of the gene encoding the protein as shown in table II, column 3 and activates its transcription. A chimeric zinc finger protein can be constructed, which comprises a specific DNA-binding domain and an activation domain as e.g. the VP16 domain of Herpes Simplex virus. The specific binding domain can bind to the regulatory region of the gene encoding the protein as shown in table II, column 3. The expression of the chimeric transcription factor in a organism, in particular in a plant, leads to a specific expression of the protein as shown in table II, column 3, see e.g. in WO01/52620, Oriz, Proc. Natl. Acad. Sci. USA, 2002, Vol. 99, 13290 or Guan, Proc. Natl. Acad. Sci. USA, 2002, Vol. 99, 13296.

[0180] In one further embodiment of the process according to the invention, organisms are used in which one of the abovementioned genes, or one of the above-mentioned nucleic acids, is mutated in a way that the activity of the encoded gene products is less influenced by cellular factors, or not at all, in comparison with the unmutated proteins. For example, well known regulation mechanism of enzymic activity are substrate inhibition or feed back regulation mechanisms. Ways and techniques for the introduction of substitution, deletions and additions of one or more bases, nucleotides or amino acids of a corresponding sequence are described herein below in the corresponding paragraphs and the references listed there, e.g. in Sambrook et al., Molecular Cloning, Cold Spring Habour, N.Y., 1989. The person skilled in the art will be able to identify regulation domains and binding sites of regulators by comparing the sequence of the nucleic acid molecule of the present invention or the expression product thereof with the state of the art by computer software means which comprise algorithms for the identifying of binding sites and regulation domains or by introducing into a nucleic acid molecule or in a protein systematically mutations and assaying for those mutations which will lead to an increased specific activity or an increased activity per volume, in particular per cell.

[0181] It can therefore be advantageous to express in an organism a nucleic acid molecule of the invention or a polypeptide of the invention derived from a evolutionary distantly related organism, as e.g. using a prokaryotic gene in a eukaryotic host, as in these cases the regulation mechanism of the host cell may not weaken the activity (cellular or specific) of the gene or its expression product.

[0182] The mutation is introduced in such a way that the increased yield, preferably under condition of transient and repetitive abiotic stress is not adversely affected.

[0183] Less influence on the regulation of a gene or its gene product is understood as meaning a reduced regulation of the enzymatic activity leading to an increased specific or cellular activity of the gene or its product. An increase of the enzymatic activity is understood as meaning an enzymatic activity, which is increased by at least 10%, advantageously at least 20, 30 or 40%, especially advantageously by at least 50, 60 or 70% in comparison with the starting organism. This leads to an increased yield, preferably under condition of transient and repetitive abiotic stress as compared to a corresponding non-transformed wild type plant cell, plant or part thereof.

[0184] The invention provides that the above methods can be performed such that the stress tolerance is increased. It is also possible to obtain a decrease in stress tolerance.

[0185] The invention is not limited to specific nucleic acids, specific polypeptides, specific cell types, specific host cells, specific conditions or specific methods etc. as such, but may vary and numerous modifications and variations therein will be apparent to those skilled in the art. It is also to be understood that the terminology used herein is for the purpose of describing specific embodiments only and is not intended to be limiting.

[0186] The present invention also relates to isolated nucleic acids comprising a nucleic acid molecule selected from the group consisting of:
[0187] a) a nucleic acid molecule encoding the polypeptide shown in column 7 of Table II B;
[0188] b) a nucleic acid molecule shown in column 7 of Table I B;
[0189] c) a nucleic acid molecule, which, as a result of the degeneracy of the genetic code, can be derived from a polypeptide sequence depicted in column 5 or 7 of Table II and confers an increased yield, e.g. increased yield-related trait, for example enhanced tolerance to abiotic environmental stress, for example an increased drought tolerance and/or low temperature tolerance and/or an increased nutrient use efficiency, intrinsic yield and/or another mentioned yield-related trait, preferably under condition of transient and repetitive abiotic stress as compared to a corresponding non-transformed wild type plant cell, a plant or a part thereof;
[0190] d) a nucleic acid molecule having at least 30% identity with the nucleic acid molecule sequence of a polynucleotide comprising the nucleic acid molecule shown in column 5 or 7 of Table I and confers an increased yield, e.g. increased yield-related trait, for example enhanced tolerance to abiotic environmental stress, for example an increased drought tolerance and/or low temperature tolerance and/or an increased nutrient use efficiency, intrinsic yield and/or another mentioned yield-related trait, preferably under condition of transient and repetitive abiotic stress as compared to a corresponding non-transformed wild type plant cell, a plant or a part thereof;
[0191] e) a nucleic acid molecule encoding a polypeptide having at least 30% identity with the amino acid sequence of the polypeptide encoded by the nucleic acid molecule of (a) to (c) and having the activity represented by a nucleic acid molecule comprising a polynucleotide as depicted in column 5 of Table I and confers an increased yield, e.g. increased yield-related trait, for example enhanced tolerance to abiotic environmental stress, for example an increased drought tolerance and/or low temperature tolerance and/or an increased nutrient use efficiency, intrinsic yield and/or another mentioned yield-related trait, preferably under condition of transient and repetitive abiotic stress as compared to a corresponding non-transformed wild type plant cell, a plant or a part thereof;
[0192] f) nucleic acid molecule which hybridizes with a nucleic acid molecule of (a) to (c) under stringent hybridization conditions and confers an increased yield, e.g. increased yield-related trait, for example enhanced tolerance to abiotic environmental stress, for example an increased drought tolerance and/or low temperature tolerance and/or an increased nutrient use efficiency, intrinsic yield and/or another mentioned yield-related trait, preferably under condition of transient and repetitive abiotic stress as compared to a corresponding non-transformed wild type plant cell, a plant or a part thereof;
[0193] g) a nucleic acid molecule encoding a polypeptide which can be isolated with the aid of monoclonal or polyclonal antibodies made against a polypeptide encoded by one of the nucleic acid molecules of (a) to (e) and having the activity represented by the nucleic acid molecule comprising a polynucleotide as depicted in column 5 of Table I;
[0194] h) a nucleic acid molecule encoding a polypeptide comprising the consensus sequence or one or more polypeptide motifs as shown in column 7 of Table IV and preferably having the activity represented by a nucleic acid molecule comprising a polynucleotide as depicted in column 5 of Table II or IV;
[0195] h) a nucleic acid molecule encoding a polypeptide having the activity represented by a protein as depicted in column 5 of Table II and confers an increased yield, e.g. increased yield-related trait, for example enhanced tolerance to abiotic environmental stress, for example an increased drought tolerance and/or low temperature tolerance and/or an increased nutrient use efficiency, intrinsic yield and/or another mentioned yield-related trait, preferably under condition of transient and repetitive abiotic stress as compared to a corresponding non-transformed wild type plant cell, a plant or a part thereof;
[0196] i) nucleic acid molecule which comprises a polynucleotide, which is obtained by amplifying a cDNA library or a genomic library using the primers in column 7 of Table III which do not start at their 5′-end with the nucleotides ATA and preferably having the activity represented by a nucleic acid molecule comprising a polynucleotide as depicted in column 5 of Table II or IV;

[0197] and
[0198] j) a nucleic acid molecule which is obtainable by screening a suitable nucleic acid library under stringent hybridization conditions with a probe comprising a complementary sequence of a nucleic acid molecule of (a) or (b) or with a fragment thereof, having at least 15 nt, preferably 20 nt, 30 nt, 50 nt, 100 nt, 200 nt or 500 nt of a nucleic acid molecule complementary to a nucleic acid molecule sequence characterized in (a) to (e) and encoding a polypeptide having the activity represented by a protein comprising a polypeptide as depicted in column 5 of Table II;
   whereby the nucleic acid molecule according to (a) to (j) is at least in one or more nucleotides different from the sequence depicted in column 5 or 7 of Table I A and preferably which encodes a protein which differs at least in one or more amino acids from the protein sequences depicted in column 5 or 7 of Table II A.

[0199] In one embodiment the invention relates to homologs of the aforementioned sequences, which can be isolated advantageously from yeast, fungi, viruses, algae, bacteria, such as Acetobacter (subgen. Acetobacter) aceti; Acidithiobacillus ferrooxidans; Acinetobacter sp.; Actinobacillus sp; Aeromonas salmonicida; Agrobacterium tumefaciens; Aquifex aeolicus; Arcanobacterium pyogenes; Aster yellows phytoplasma; Bacillus sp.; Bifidobacterium sp.; Borrelia burgdorferi; Brevibacterium linens; Brucella melitensis; Buchnera sp.; Butyrivibrio fibrisolvens; Campylobacter jejuni; Caulobacter crescentus; Chlamydia sp.; Chlamydophila sp.; Chlorobium limicola; Citrobacter rodentium; Clostridium sp.; Comamonas testosteroni; Corynebacterium sp.; Coxiella burnetii; Deinococcus radiodurans; Dichelobacter nodosus; Edwardsiella ictaluri; Enterobacter sp.; Erysipelothrix rhusiopathiae; Escherichia coli; Flavobacterium sp.; Francisella tularensis; Frankia sp. Cpl1; Fusobacterium nucleatum; Geobacillus stearothermophilus; Gluconobacter oxydans; Haemophilus sp.; Helicobacter pylori; Klebsiella pneumoniae; Lactobacillus sp.; Lactococcus lactis; Listeria sp.; Mannheimia haemolytica; Mesorhizobium loti; Methylophaga thalassica; Microcystis aeruginosa; Microscilla sp. PRE1; Moraxella sp. TA144; Mycobacterium sp.; Mycoplasma sp.; Neisseria sp.; Nitrosomonas sp.; Nostoc sp. PCC 7120; Novosphingobium aromaticivorans; Oenococcus oeni; Pantoea citrea; Pasteurella multocida; Pediococcus pentosaceus; Phormidium foveolarum; Phytoplasma sp.; Plectonema boryanum; Prevotella ruminicola; Propionibacterium sp.; Proteus vulgaris; Pseudomonas sp.; Ralstonia sp.; Rhizobium sp.; Rhodococcus equi; Rhodothermus marinus; Rickettsia sp.; Riemerella anatipestifer; Ruminococcus flavefaciens; Salmonella sp.; Selenomonas ruminantium; Serratia entomophila; Shigella sp.; Sinorhizobium meliloti; Staphylococcus sp.; Streptococcus sp.; Streptomyces sp.; Synechococcus sp.; Synechocystis sp. PCC 6803; Thermotoga maritima; Treponema sp.; Ureaplasma urealyticum; Vibrio cholerae; Vibrio parahaemolyticus; Xylella fastidiosa; Yersinia sp.; Zymomonas mobilis, preferably Salmonella sp. or Escherichia coli or plants, preferably from yeasts such as from the genera Saccharomyces, Pichia, Candida, Hansenula, Torulopsis or Schizosaccharomyces or plants such as Arabidopsis thaliana, maize, wheat, rye, oat, triticale, rice, barley, soybean, peanut, cotton, borage, sunflower, linseed, primrose, rapeseed, canola and turnip rape, manihot, pepper, sunflower, tagetes, solanaceous plant such as potato, tobacco, eggplant and tomato, Vicia species, pea, alfalfa, bushy plants such as coffee, cacao, tea, Salix species, trees such as oil palm, coconut, perennial grass, such as ryegrass and fescue, and forage crops, such as alfalfa and clover and from spruce, pine or fir for example. More preferably homologs of aforementioned sequences can be isolated from Saccharomyces cerevisiae, E. coli or plants, preferably Brassica napus, Glycine max, Zea mays, cotton, or Oryza sativa.

[0200] The (stress related) proteins of the present invention are preferably produced by recombinant DNA techniques. For example, a nucleic acid molecule encoding the protein is cloned into an expression vector, for example in to a binary vector, the expression vector is introduced into a host cell, for example the Arabidopsis thaliana wild type NASC N906 or any other plant cell as described in the examples see below, and the stress related protein is expressed in said host cell. Examples for binary vectors are pBIN19, pBI101, pBinAR, pGPTV, pCAMBIA, pBIB-HYG, pBecks, pGreen or pPZP (Hajukiewicz, P. et al., 1994, Plant Mol. Biol., 25: 989-994 and Hellens et al, Trends in Plant Science (2000) 5, 446-451.).

In one embodiment the (stress related) protein of the present invention is preferably produced in an compartment of the cell, more preferably in the plastids. Ways of introducing nucleic acids into plastids and producing proteins in this compartment are know to the person skilled in the art have been also described in this application.

[0201] Advantageously, the nucleic acid sequences according to the invention or the gene construct together with at least one reporter gene are cloned into an expression cassette, which is introduced into the organism via a vector or directly into the genome. This reporter gene should allow easy detection via a growth, fluorescence, chemical, bioluminescence or resistance assay or via a photometric measurement. Examples of reporter genes which may be mentioned are antibiotic- or herbicide-resistance genes, hydrolase genes, fluorescence protein genes, bioluminescence genes, sugar or nucleotide metabolic genes or biosynthesis genes such as the Ura3 gene, the IIv2 gene, the luciferase gene, the β-galactosidase gene, the gfp gene, the 2-desoxyglucose-6-phosphate phosphatase gene, the β-glucuronidase gene, β-lactamase gene, the neomycin phosphotransferase gene, the hygromycin phosphotransferase gene, a mutated acetohydroxyacid synthase (AHAS) gene, also known as acetolactate synthase (ALS) gene], a gene for a D-amino acid metabolizing enzmye or the BASTA (=gluphosinate-resistance) gene. These genes permit easy measurement and quantification of the transcription activity and hence of the expression of the genes. In this way genome positions may be identified which exhibit differing productivity.

[0202] In a preferred embodiment a nucleic acid construct, for example an expression cassette, comprises upstream, i.e. at the 5′ end of the encoding sequence, a promoter and downstream, i.e. at the 3′ end, a polyadenylation signal and optionally other regulatory elements which are operably linked to the intervening encoding sequence with one of the nucleic acids of SEQ ID NO as depicted in table I, column 5 and 7. By an operable linkage is meant the sequential arrangement of promoter, encoding sequence, terminator and optionally other regulatory elements in such a way that each of the regulatory elements can fulfill its function in the expression of the encoding sequence in due manner. The sequences preferred for operable linkage are targeting sequences for ensuring subcellular localization in plastids. However, targeting sequences for ensuring subcellular localization in the mitochondrium, in the endoplasmic reticulum (=ER), in the nucleus, in oil corpuscles or other compartments may also be employed as well as translation promoters such as the 5′ lead sequence in tobacco mosaic virus (Gallie et al., Nucl. Acids Res. 15 (1987), 8693-8711).

[0203] A nucleic acid construct, for example an expression cassette may, for example, contain a constitutive promoter or a tissue-specific promoter (preferably the USP or napin promoter) the gene to be expressed and the ER retention signal. For the ER retention signal the KDEL amino acid sequence (lysine, aspartic acid, glutamic acid, leucine) or the KKX amino acid sequence (lysine-lysine-X-stop, wherein X means every other known amino acid) is preferably employed.

[0204] For expression in a host organism, for example a plant, the expression cassette is advantageously inserted into a vector such as by way of example a plasmid, a phage or other DNA which allows optimal expression of the genes in the host organism. Examples of suitable plasmids are: in E. coli pLG338, pACYC184, pBR series such as e.g. pBR322, pUC series such as pUC18 or pUC19, M113 mp series, pKC30, pRep4, pHS1, pHS2, pPLc236, pMBL24, pLG200, pUR290, pIN-III¹¹³-B1, λgt11 or pBdCl; in Streptomyces pIJ101, pIJ364, pIJ702 or pIJ361; in Bacillus pUB110, pC194 or pBD214; in Corynebacterium pSA77 or pAJ667; in fungi pALS1, pIL2 or pBB116; other advantageous fungal vectors are described by Romanos, M. A. et al., [(1992), “Foreign gene expression in yeast: a review”, Yeast 8: 423-488] and by van den Hondel, C.A.M.J.J. et al. [(1991), “Heterologous gene expression in filamentous fungi” as well as in More Gene Manipulations in Fungi [J. W. Bennet & L. L. Lasure, eds., pp. 396-428: Academic Press: San Diego] and in, “Gene transfer systems and vector development for filamentous fungi” [van den Hondel, C.A.M.J.J. & Punt, P. J. (1991) in: Applied Molecular Genetics of Fungi, Peberdy, J. F. et al., eds., pp. 1-28, Cambridge University Press: Cambridge]. Examples of advantageous yeast promoters are 2 μM, pAG-1, YEp6, YEp13 or pEMBLYe23. Examples of algal or plant promoters are pLGV23, pGHlac⁺, pBIN19, pAK2004, pVKH or pDH51 (see Schmidt, R. and Willmitzer, L., 1988). The vectors identified above or derivatives of the vectors identified above are a small selection of the possible plasmids. Further plasmids are well known to those skilled in the art and may be found, for example, in the book Cloning Vectors (Eds. Pouwels P. H. et al. Elsevier, Amsterdam-New York-Oxford, 1985, ISBN 0 444 904018). Suitable plant vectors are described inter alia in, “Methods in Plant Molecular Biology and Biotechnology” (CRC Press), Ch. 6/7, pp. 71-119. Advantageous vectors are known as shuttle vectors or binary vectors which replicate in E. coli and Agrobacterium.

[0205] By vectors is meant with the exception of plasmids all other vectors known to those skilled in the art such as by way of example phages, viruses such as SV40, CMV, baculovirus, adenovirus, transposons, IS elements, phasmids, phagemids, cosmids, linear or circular DNA. These vectors can be replicated autonomously in the host organism or be chromosomally replicated, chromosomal replication being preferred.

[0206] In a further embodiment of the vector the expression cassette according to the invention may also advantageously be introduced into the organisms in the form of a linear DNA and be integrated into the genome of the host organism by way of heterologous or homologous recombination. This linear DNA may be composed of a linearized plasmid or only of the expression cassette as vector or the nucleic acid sequences according to the invention.

[0207] In a further advantageous embodiment the nucleic acid sequence according to the invention can also be introduced into an organism on its own.

[0208] If in addition to the nucleic acid sequence according to the invention further genes are to be introduced into the organism, all together with a reporter gene in a single vector or each single gene with a reporter gene in a vector in each case can be introduced into the organism, whereby the different vectors can be introduced simultaneously or successively.

[0209] The vector advantageously contains at least one copy of the nucleic acid sequences according to the invention and/or the expression cassette (=gene construct) according to the invention.

[0210] The invention further provides an isolated recombinant expression vector comprising a nucleic acid encoding a polypeptide as depicted in table II, column 5 or 7, wherein expression of the vector in a host cell results in increased tolerance to environmental stress as compared to a wild type variety of the host cell. As used herein, the term “vector” refers to a nucleic acid molecule capable of transporting another nucleic acid to which it has been linked. One type of vector is a “plasmid,” which refers to a circular double stranded DNA loop into which additional DNA segments can be ligated. Another type of vector is a viral vector, wherein additional DNA segments can be ligated into the viral genome. Certain vectors are capable of autonomous replication in a host cell into which they are introduced (e.g., bacterial vectors having a bacterial origin of replication and episomal mammalian vectors). Other vectors (e.g., non-episomal mammalian vectors) are integrated into the genome of a host cell or a organelle upon introduction into the host cell, and thereby are replicated along with the host or organelle genome. Moreover, certain vectors are capable of directing the expression of genes to which they are operatively linked. Such vectors are referred to herein as “expression vectors.” In general, expression vectors of utility in recombinant DNA techniques are often in the form of plasmids. In the present specification, “plasmid” and “vector” can be used interchangeably as the plasmid is the most commonly used form of vector. However, the invention is intended to include such other forms of expression vectors, such as viral vectors (e.g., replication defective retroviruses, adenoviruses, and adeno-associated viruses), which serve equivalent functions.

[0211] The recombinant expression vectors of the invention comprise a nucleic acid of the invention in a form suitable for expression of the nucleic acid in a host cell, which means that the recombinant expression vectors include one or more regulatory sequences, selected on the basis of the host cells to be used for expression, which is operatively linked to the nucleic acid sequence to be expressed. As used herein with respect to a recombinant expression vector, “operatively linked” is intended to mean that the nucleotide sequence of interest is linked to the regulatory sequence(s) in a manner which allows for expression of the nucleotide sequence (e.g., in an in vitro transcription/translation system or in a host cell when the vector is introduced into the host cell). The term “regulatory sequence” is intended to include promoters, enhancers, and other expression control elements (e.g., polyadenylation signals). Such regulatory sequences are described, for example, in Goeddel, Gene Expression Technology: Methods in Enzymology 185, Academic Press, San Diego, Calif. (1990) and Gruber and Crosby, in: Methods in Plant Molecular Biology and Biotechnology, eds. Glick and Thompson, Chapter 7, 89-108, CRC Press: Boca Raton, Fla., including the references therein. Regulatory sequences include those that direct constitutive expression of a nucleotide sequence in many types of host cells and those that direct expression of the nucleotide sequence only in certain host cells or under certain conditions. It will be appreciated by those skilled in the art that the design of the expression vector can depend on such factors as the choice of the host cell to be transformed, the level of expression of polypeptide desired, etc. The expression vectors of the invention can be introduced into host cells to thereby produce polypeptides or peptides, including fusion polypeptides or peptides, encoded by nucleic acids as described herein (e.g., YSRPs, mutant forms of YSRPs, fusion polypeptides, etc.).

[0212] The recombinant expression vectors of the invention can be designed for expression of the polypeptide of the invention in plant cells. For example, YSRP genes can be expressed in plant cells (See Schmidt, R. and Willmitzer, L., 1988, High efficiency Agrobacterium tumefaciens-mediated transformation of Arabidopsis thaliana leaf and cotyledon explants, Plant Cell Rep. 583-586; Plant Molecular Biology and Biotechnology, C Press, Boca Raton, Fla., chapter 6/7, S.71-119 (1993); F. F. White, B. Jenes et al., Techniques for Gene Transfer, in: Transgenic Plants, Vol. 1, Engineering and Utilization, eds. Kung and R. Wu, 128-43, Academic Press: 1993; Potrykus, 1991, Annu. Rev. Plant Physiol. Plant Molec. Biol. 42:205-225 and references cited therein). Suitable host cells are discussed further in Goeddel, Gene Expression Technology: Methods in Enzymology 185, Academic Press: San Diego, Calif. (1990). Alternatively, the recombinant expression vector can be transcribed and translated in vitro, for example using T7 promoter regulatory sequences and T7 polymerase.

[0213] Expression of polypeptides in prokaryotes is most often carried out with vectors containing constitutive or inducible promoters directing the expression of either fusion or non-fusion polypeptides. Fusion vectors add a number of amino acids to a polypeptide encoded therein, usually to the amino terminus of the recombinant polypeptide but also to the C-terminus or fused within suitable regions in the polypeptides. Such fusion vectors typically serve three purposes: 1) to increase expression of a recombinant polypeptide; 2) to increase the solubility of a recombinant polypeptide; and 3) to aid in the purification of a recombinant polypeptide by acting as a ligand in affinity purification. Often, in fusion expression vectors, a proteolytic cleavage site is introduced at the junction of the fusion moiety and the recombinant polypeptide to enable separation of the recombinant polypeptide from the fusion moiety subsequent to purification of the fusion polypeptide. Such enzymes, and their cognate recognition sequences, include Factor Xa, thrombin, and enterokinase.

[0214] By way of example the plant expression cassette can be installed in the pRT transformation vector ((a) Toepfer et al., 1993, Methods Enzymol., 217: 66-78; (b) Toepfer et al. 1987, Nucl. Acids. Res. 15: 5890 ff.).

Alternatively, a recombinant vector (=expression vector) can also be transcribed and translated in vitro, e.g. by using the T7 promoter and the T7 RNA polymerase.

[0215] Expression vectors employed in prokaryotes frequently make use of inducible systems with and without fusion proteins or fusion oligopeptides, wherein these fusions can ensue in both N-terminal and C-terminal manner or in other useful domains of a protein. Such fusion vectors usually have the following purposes: i.) to increase the RNA expression rate; ii.) to increase the achievable protein synthesis rate; iii.) to increase the solubility of the protein; iv.) or to simplify purification by means of a binding sequence usable for affinity chromatography. Proteolytic cleavage points are also frequently introduced via fusion proteins, which allow cleavage of a portion of the fusion protein and purification. Such recognition sequences for proteases are recognized, e.g. factor Xa, thrombin and enterokinase.

[0216] Typical advantageous fusion and expression vectors are pGEX [Pharmacia Biotech Inc; Smith, D. B. and Johnson, K. S. (1988) Gene 67: 31-40], pMAL (New England Biolabs, Beverly, Mass.) and pRIT5 (Pharmacia, Piscataway, N.J.) which contains glutathione S-transferase (GST), maltose binding protein or protein A.

[0217] In one embodiment, the coding sequence of the polypeptide of the invention is cloned into a pGEX expression vector to create a vector encoding a fusion polypeptide comprising, from the N-terminus to the C-terminus, GST-thrombin cleavage site-X polypeptide. The fusion polypeptide can be purified by affinity chromatography using glutathione-agarose resin. Recombinant YSRP unfused to GST can be recovered by cleavage of the fusion polypeptide with thrombin.

Other examples of E. coli expression vectors are pTrc [Amann et al., (1988) Gene 69:301-315] and pET vectors [Studier et al., Gene Expression Technology: Methods in Enzymology 185, Academic Press, San Diego, Calif. (1990) 60-89; Stratagene, Amsterdam, The Netherlands].

[0218] Target gene expression from the pTrc vector relies on host RNA polymerase transcription from a hybrid trp-lac fusion promoter. Target gene expression from the pET 11d vector relies on transcription from a T7 gn10-lac fusion promoter mediated by a co-expressed viral RNA polymerase (T7 gn1). This viral polymerase is supplied by host strains BL21 (DE3) or HMS174 (DE3) from a resident I prophage harboring a T7 gn1 gene under the transcriptional control of the lacUV 5 promoter.

[0219] In a preferred embodiment of the present invention, the YSRPs are expressed in plants and plants cells such as unicellular plant cells (e.g. algae) (See Falciatore et al., 1999, Marine Biotechnology 1(3):239-251 and references therein) and plant cells from higher plants (e.g., the spermatophytes, such as crop plants). A nucleic acid molecule coding for YSRP as depicted in table II, column 5 or 7 may be “introduced” into a plant cell by any means, including transfection, transformation or transduction, electroporation, particle bombardment, agroinfection, and the like. One transformation method known to those of skill in the art is the dipping of a flowering plant into an Agrobacteria solution, wherein the Agrobacteria contains the nucleic acid of the invention, followed by breeding of the transformed gametes.

[0220] Other suitable methods for transforming or transfecting host cells including plant cells can be found in Sambrook, et al., Molecular Cloning: A Laboratory Manual. 2^{nd}, ed., Cold Spring Harbor Laboratory, Cold Spring Harbor Laboratory Press, Cold Spring Harbor, N.Y., 1989, and other laboratory manuals such as Methods in Molecular Biology, 1995, Vol. 44, Agrobacterium protocols, ed: Gartland and Davey, Humana Press, Totowa, N.J. As biotic and abiotic stress tolerance is a general trait wished to be inherited into a wide variety of plants like maize, wheat, rye, oat, triticale, rice, barley, soybean, peanut, cotton, rapeseed and canola, manihot, pepper, sunflower and tagetes, solanaceous plants like potato, tobacco, eggplant, and tomato, Vicia species, pea, alfalfa, bushy plants (coffee, cacao, tea), Salix species, trees (oil palm, coconut), perennial grasses, and forage crops, these crop plants are also preferred target plants for a genetic engineering as one further embodiment of the present invention. Forage crops include, but are not limited to, Wheatgrass, Canarygrass, Bromegrass, Wildrye Grass, Bluegrass, Orchardgrass, Alfalfa, Salfoin, Birdsfoot Trefoil, Alsike Clover, Red Clover, and Sweet Clover.

[0221] In one embodiment of the present invention, transfection of a nucleic acid molecule coding for YSRP as depicted in table II, column 5 or 7 into a plant is achieved by Agrobacterium mediated gene transfer. Agrobacterium mediated plant transformation can be performed using for example the GV3101 (pMP90) (Koncz and Schell, 1986, Mol. Gen. Genet. 204:383-396) or LBA4404 (Clontech) Agrobacterium tumefaciens strain. Transformation can be performed by standard transformation and regeneration techniques (Deblaere et al., 1994, Nucl. Acids Res. 13:4777-4788; Gelvin, Stanton B. and Schilperoort, Robert A, Plant Molecular Biology Manual, 2^{nd} Ed.-Dordrecht: Kluwer Academic Publ., 1995.—in Sect., Ringbuc Zentrale Signatur: BT11-P ISBN 0-7923-2731-4; Glick, Bernard R.; Thompson, John E., Methods in Plant Molecular Biology and Biotechnology, Boca Raton: CRC Press, 1993 360 S., ISBN 0-8493-5164-2). For example, rapeseed can be transformed via cotyledon or hypocotyl transformation (Moloney et al., 1989, Plant cell Report 8:238-242; De Block et al., 1989, Plant Physiol. 91:694-701). Use of antibiotics for Agrobacterium and plant selection depends on the binary vector and the Agrobacterium strain used for transformation. Rapeseed selection is normally performed using kanamycin as selectable plant marker. Agrobacterium mediated gene transfer to flax can be performed using, for example, a technique described by Mlynarova et al., 1994, Plant Cell Report 13:282-285. Additionally, transformation of soybean can be performed using for example a technique described in European Patent No. 0424 047, U.S. Pat. No. 5,322,783, European Patent No. 0397 687, U.S. Pat. No. 5,376,543, or U.S. Pat. No. 5,169,770. Transformation of maize can be achieved by particle bombardment, polyethylene glycol mediated DNA uptake or via the silicon carbide fiber technique. (See, for example, Freeling and Walbot “The maize handbook” Springer Verlag: New York (1993) ISBN 3-540-97826-7). A specific example of maize transformation is found in U.S. Pat. No. 5,990,387, and a specific example of wheat transformation can be found in PCT Application No. WO 93/07256.

[0222] According to the present invention, the introduced nucleic acid molecule coding for YSRP as depicted in table II, column 5 or 7 may be maintained in the plant cell stably if it is incorporated into a non-chromosomal autonomous replicon or integrated into the plant chromosomes or organelle genome. Alternatively, the introduced YSRP may be present on an extra-chromosomal non-replicating vector and be transiently expressed or transiently active.

[0223] In one embodiment, a homologous recombinant microorganism can be created wherein the YSRP is integrated into a chromosome, a vector is prepared which contains at least a portion of a nucleic acid molecule coding for YSRP as depicted in table II, column 5 or 7 into which a deletion, addition, or substitution has been introduced to thereby alter, e.g., functionally disrupt, the YSRP gene. Preferably, the YSRP gene is a yeast or a E. coli. gene, but it can be a homolog from a related plant or even from a mammalian or insect source. The vector can be designed such that, upon homologous recombination, the endogenous nucleic acid molecule coding for YSRP as depicted in table II, column 5 or 7 is mutated or otherwise altered but still encodes a functional polypeptide (e.g., the upstream regulatory region can be altered to thereby alter the expression of the endogenous YSRP). In a preferred embodiment the biological activity of the protein of the invention is increased upon homologous recombination. To create a point mutation via homologous recombination, DNA-RNA hybrids can be used in a technique known as chimeraplasty (Cole-Strauss et al., 1999, Nucleic Acids Research 27(5):1323-1330 and Kmiec, 1999 Gene therapy American Scientist. 87(3):240-247). Homologous recombination procedures in Physcomitrella patens are also well known in the art and are contemplated for use herein.

[0224] Whereas in the homologous recombination vector, the altered portion of the nucleic acid molecule coding for YSRP as depicted in table II, column 5 or 7 is flanked at its 5′ and 3′ ends by an additional nucleic acid molecule of the YSRP gene to allow for homologous recombination to occur between the exogenous YSRP gene carried by the vector and an endogenous YSRP gene, in a microorganism or plant. The additional flanking YSRP nucleic acid molecule is of sufficient length for successful homologous recombination with the endogenous gene. Typically, several hundreds of base pairs up to kilobases of flanking DNA (both at the 5′ and 3′ ends) are included in the vector. See, e.g., Thomas, K. R., and Capecchi, M. R., 1987, Cell 51:503 for a description of homologous recombination vectors or Strepp et al., 1998, PNAS, 95 (8):4368-4373 for cDNA based recombination in Physcomitrella patens). The vector is introduced into a microorganism or plant cell (e.g., via polyethylene glycol mediated DNA), and cells in which the introduced YSRP gene has homologously recombined with the endogenous YSRP gene are selected using art-known techniques.

[0225] Whether present in an extra-chromosomal non-replicating vector or a vector that is integrated into a chromosome, the nucleic acid molecule coding for YSRP as depicted in table II, column 5 or 7 preferably resides in a plant expression cassette. A plant expression cassette preferably contains regulatory sequences capable of driving gene expression in plant cells that are operatively linked so that each sequence can fulfill its function, for example, termination of transcription by polyadenylation signals. Preferred polyadenylation signals are those originating from Agrobacterium tumefaciens t-DNA such as the gene 3 known as octopine synthase of the Ti-plasmid pTiACH5 (Gielen et al., 1984, EMBO J. 3:835) or functional equivalents thereof but also all other terminators functionally active in plants are suitable. As plant gene expression is very often not limited on transcriptional levels, a plant expression cassette preferably contains other operatively linked sequences like translational enhancers such as the overdrive-sequence containing the 5″-untranslated leader sequence from tobacco mosaic virus enhancing the polypeptide per RNA ratio (Gallie et al., 1987, Nucl. Acids Research 15:8693-8711). Examples of plant expression vectors include those detailed in: Becker, D. et al., 1992, New plant binary vectors with selectable markers located proximal to the left border, Plant Mol. Biol. 20: 1195-1197; and Bevan, M. W., 1984, Binary Agrobacterium vectors for plant transformation, Nucl. Acid. Res. 12:8711-8721; and Vectors for Gene Transfer in Higher Plants; in: Transgenic Plants, Vol. 1, Engineering and Utilization, eds.: Kung and R. Wu, Academic Press, 1993, S. 15-38.

[0226] “Transformation” is defined herein as a process for introducing heterologous DNA into a plant cell, plant tissue, or plant. It may occur under natural or artificial conditions using various methods well known in the art. Transformation may rely on any known method for the insertion of foreign nucleic acid sequences into aprokaryotic or eukaryotic host cell. The method is selected based on the host cell being transformed and may include, but is not limited to, viral infection, electroporation, lipofection, and particle bombardment. Such “transformed” cells include stably trans-formed cells in which the inserted DNA is capable of replication either as an autonomously replicating plasmid or as part of the host chromosome. They also include cells which transiently express the inserted DNA or RNA for limited periods of time. Trans-formed plant cells, plant tissue, or plants are understood to encompass not only the end product of a transformation process, but also transgenic progeny thereof.

[0227] The terms “transformed,” “transgenic,” and “recombinant” refer to a host organism such as a bacterium or a plant into which a heterologous nucleic acid molecule has been introduced. The nucleic acid molecule can be stably integrated into the genome of the host or the nucleic acid molecule can also be present as an extrachromosomal molecule. Such an extrachromosomal molecule can be auto-replicating. Transformed cells, tissues, or plants are understood to encompass not only the end product of a transformation process, but also transgenic progeny thereof. A “non-transformed,” “non-transgenic,” or “non-recombinant” host refers to a wild-type organism, e.g., a bacterium or plant, which does not contain the heterologous nucleic acid molecule.

[0228] A “transgenic plant”, as used herein, refers to a plant which contains a foreign nucleotide sequence inserted into either its nuclear genome or organellar genome. It encompasses further the offspring generations i.e. the T1-, T2- and consecutively generations or BC1-, BC2- and consecutively generation as well as crossbreeds thereof with non-transgenic or other transgenic plants.

[0229] The host organism (=transgenic organism) advantageously contains at least one copy of the nucleic acid according to the invention and/or of the nucleic acid construct according to the invention.

In principle all plants can be used as host organism. Preferred transgenic plants are, for example, selected from the families Aceraceae, Anacardiaceae, Apiaceae, Asteraceae, Brassicaceae, Cactaceae, Cucurbitaceae, Euphorbiaceae, Fabaceae, Malvaceae, Nymphaeaceae, Papaveraceae, Rosaceae, Salicaceae, Solanaceae, Arecaceae, Bromeliaceae, Cyperaceae, Iridaceae, Liliaceae, Orchidaceae, Gentianaceae, Labiaceae, Magnoliaceae, Ranunculaceae, Carifolaceae, Rubiaceae, Scrophulariaceae, Caryophyllaceae, Ericaceae, Polygonaceae, Violaceae, Juncaceae or Poaceae and preferably from a plant selected from the group of the families Apiaceae, Asteraceae, Brassicaceae, Cucurbitaceae, Fabaceae, Papaveraceae, Rosaceae, Solanaceae, Liliaceae or Poaceae. Preferred are crop plants such as plants advantageously selected from the group of the genus peanut, oilseed rape, canola, sunflower, safflower, olive, sesame, hazelnut, almond, avocado, bay, pumpkin/squash, linseed, soya, pistachio, borage, maize, wheat, rye, oats, sorghum and millet, triticale, rice, barley, cassava, potato, sugarbeet, egg plant, alfalfa, and perennial grasses and forage plants, oil palm, vegetables (brassicas, root vegetables, tuber vegetables, pod vegetables, fruiting vegetables, onion vegetables, leafy vegetables and stem vegetables), buckwheat, Jerusalem artichoke, broad bean, vetches, lentil, dwarf bean, lupin, clover and Lucerne for mentioning only some of them.
In one embodiment of the invention transgenic plants are selected from the group comprising corn, soy, oil seed rape (including canola and winter oil seed reap), cotton, wheat and rice.
In one preferred embodiment, the host plant is selected from the families Aceraceae, Anacardiaceae, Apiaceae, Asteraceae, Brassicaceae, Cactaceae, Cucurbitaceae, Euphorbiaceae, Fabaceae, Malvaceae, Nymphaeaceae, Papaveraceae, Rosaceae, Salicaceae, Solanaceae, Arecaceae, Bromeliaceae, Cyperaceae, Iridaceae, Liliaceae, Orchidaceae, Gentianaceae, Labiaceae, Magnoliaceae, Ranunculaceae, Carifolaceae, Rubiaceae, Scrophulariaceae, Caryophyllaceae, Ericaceae, Polygonaceae, Violaceae, Juncaceae or Poaceae and preferably from a plant selected from the group of the families Apiaceae, Asteraceae, Brassicaceae, Cucurbitaceae, Fabaceae, Papaveraceae, Rosaceae, Solanaceae, Liliaceae or Poaceae. Preferred are crop plants and in particular plants mentioned herein above as host plants such as the families and genera mentioned above for example preferred the species Anacardium occidentale, Calendula officinalis, Carthamus tinctorius, Cichorium intybus, Cynara scolymus, Helianthus annus, Tagetes lucida, Tagetes erecta, Tagetes tenuifolia; Daucus carota; Corylus avellana, Corylus colurna, Borago officinalis; Brassica napus, Brassica rapa ssp., Sinapis arvensis Brassica juncea, Brassica juncea var. juncea, Brassica juncea var. crispifolia, Brassica juncea var. foliosa, Brassica nigra, Brassica sinapioides, Melanosinapis communis, Brassica oleracea, Arabidopsis thaliana, Anana comosus, Ananas ananas, Bromelia comosa, Carica papaya, Cannabis sative, Ipomoea batatus, Ipomoea pandurata, Convolvulus batatas, Convolvulus tiliaceus, Ipomoea fastigiata, Ipomoea tiliacea, Ipomoea triloba, Convolvulus panduratus, Beta vulgaris, Beta vulgaris var. altissima, Beta vulgaris var. vulgaris, Beta maritima, Beta vulgaris var. perennis, Beta vulgaris var. conditiva, Beta vulgaris var. esculenta, Cucurbita maxima, Cucurbita mixta, Cucurbita pepo, Cucurbita moschata, Olea europaea, Manihot utilissima, Janipha manihot, Jatropha manihot., Manihot aipil, Manihot dulcis, Manihot manihot, Manihot melanobasis, Manihot esculenta, Ricinus communis, Pisum sativum, Pisum arvense, Pisum humile, Medicago sativa, Medicago falcata, Medicago varia, Glycine max Dolichos soja, Glycine gracilis, Glycine hispida, Phaseolus max, Soja hispida, Soja max, Cocos nucifera, Pelargonium grossularioides, Oleum cocoas, Laurus nobilis, Persea americana, Arachis hypogaea, Linum usitatissimum, Linum humile, Linum austriacum, Linum bienne, Linum angustifolium, Linum catharticum, Linum flavum, Linum grandiflorum, Adenolinum grandiflorum, Linum lewisii, Linum narbonense, Linum perenne, Linum perenne var. lewisii, Linum pratense, Linum trigynum, Punica granatum, Gossypium hirsutum, Gossypium arboreum, Gossypium barbadense, Gossypium herbaceum, Gossypium thurberi, Musa nana, Musa acuminata, Musa paradisiaca, Musa spp., Elaeis guineensis, Papaver orientale, Papaver rhoeas, Papaver dubium, Sesamum indicum, Piper aduncum, Piper amalago, Piper angustifolium, Piper auritum, Piper betel, Piper cubeba, Piper longum, Piper nigrum, Piper retrofractum, Artanthe adunca, Artanthe elongata, Peperomia elongata, Piper elongatum, Steffensia elongata, Hordeum vulgare, Hordeum jubatum, Hordeum murinum, Hordeum secalinum, Hordeum distichon Hordeum aegiceras, Hordeum hexastichon., Hordeum hexastichum, Hordeum irregulare, Hordeum sativum, Hordeum secalinum, Avena sativa, Avena fatua, Avena byzantina, Avena fatua var. sativa, Avena hybrida, Sorghum bicolor, Sorghum halepense, Sorghum saccharatum, Sorghum vulgare, Andropogon drummondii, Holcus bicolor, Holcus sorghum, Sorghum aethiopicum, Sorghum arundinaceum, Sorghum caffrorum, Sorghum cernuum, Sorghum dochna, Sorghum drummondii, Sorghum durra, Sorghum guineense, Sorghum lanceolatum, Sorghum nervosum, Sorghum saccharatum, Sorghum subglabrescens, Sorghum verticilliflorum, Sorghum vulgare, Holcus halepensis, Sorghum miliaceum millet, Panicum militaceum, Zea mays, Triticum aestivum, Triticum durum, Triticum turgidum, Triticum hybernum, Triticum macha, Triticum sativum or Triticum vulgare, Cofea spp., Coffea arabica, Coffea canephora, Coffea liberica, Capsicum annuum, Capsicum annuum var. glabriusculum, Capsicum frutescens, Capsicum annuum, Nicotiana tabacum, Solanum tuberosum, Solanum melongena, Lycopersicon esculentum, Lycopersicon lycopersicum., Lycopersicon pyriforme, Solanum integrifolium, Solanum lycopersicum Theobroma cacao or Camellia sinensis.
Anacardiaceae such as the genera Pistacia, Mangifera, Anacardium e.g. the species Pistacia vera [pistachios, Pistazie], Mangifer indica [Mango] or Anacardium occidentale [Cashew]; Asteraceae such as the genera Calendula, Carthamus, Centaurea, Cichorium, Cynara, Helianthus, Lactuca, Locusta, Tagetes, Valeriana e.g. the species Calendula officinalis [Marigold], Carthamus tinctorius [safflower], Centaurea cyanus [cornflower], Cichorium intybus [blue daisy], Cynara scolymus [Artichoke], Helianthus annus [sunflower], Lactuca sativa, Lactuca crispa, Lactuca esculenta, Lactuca scariola L. ssp. sativa, Lactuca scariola L. var. integrate, Lactuca scariola L. var. integrifolia, Lactuca sativa subsp. romana, Locusta communis, Valeriana locusta [lettuce], Tagetes lucida, Tagetes erecta or Tagetes tenuifolia [Marigold]; Apiaceae such as the genera Daucus e.g. the species Daucus carota [carrot]; Betulaceae such as the genera Corylus e.g. the species Corylus avellana or Corylus colurna [hazelnut]; Boraginaceae such as the genera Borago e.g. the species Borago officinalis [borage]; Brassicaceae such as the genera Brassica, Melanosinapis, Sinapis, Arabadopsis e.g. the species Brassica napus, Brassica rapa ssp. [canola, oilseed rape, turnip rape], Sinapis arvensis Brassica juncea, Brassica juncea var. juncea, Brassica juncea var. crispifolia, Brassica juncea var. foliosa, Brassica nigra, Brassica sinapioides, Melanosinapis communis [mustard], Brassica oleracea [fodder beet] or Arabidopsis thaliana; Bromeliaceae such as the genera Anana, Bromelia e.g. the species Anana comosus, Ananas ananas or Bromelia comosa [pineapple]; Caricaceae such as the genera Carica e.g. the species Carica papaya [papaya]; Cannabaceae such as the genera Cannabis e.g. the species Cannabis sative [hemp], Convolvulaceae such as the genera Ipomea, Convolvulus e.g. the species Ipomoea batatus, Ipomoea pandurata, Convolvulus batatas, Convolvulus tiliaceus, Ipomoea fastigiata, Ipomoea tiliacea, Ipomoea triloba or Convolvulus panduratus [sweet potato, Man of the Earth, wild potato], Chenopodiaceae such as the genera Beta, i.e. the species Beta vulgaris, Beta vulgaris var. altissima, Beta vulgaris var. Vulgaris Beta maritima, Beta vulgaris var. perennis, Beta vulgaris var. conditiva or Beta vulgaris var. esculenta [sugar beet]; Cucurbitaceae such as the genera Cucurbita e.g. the species Cucurbita maxima, Cucurbita mixta, Cucurbita pepo or Cucurbita moschata [pumpkin, squash]; Elaeagnaceae such as the genera Elaeagnus e.g. the species Olea europaea [olive]; Ericaceae such as the genera Kalmia e.g. the species Kalmia latifolia, Kalmia angustifolia, Kalmia microphylla, Kalmia polifolia, Kalmia occidentalis, Cistus chamaerhodendros or Kalmia lucida [American laurel, broad-leafed laurel, calico bush, spoon wood, sheep laurel, alpine laurel, bog laurel, western bog-laurel, swamp-laurel]; Euphorbiaceae such as the genera Manihot, Janipha, Jatropha, Ricinus e.g. the species Manihot utilissima, Janipha manihot, Jatropha manihot., Manihot aipil, Manihot dulcis, Manihot manihot, Manihot melanobasis, Manihot esculenta [manihot, arrowroot, tapioca, cassava] or Ricinus communis [castor bean, Castor Oil Bush, Castor Oil Plant, Palma Christi, Wonder Tree]; Fabaceae such as the genera Pisum, Albizia, Cathormion, Feuillea, Inga, Pithecolobium, Acacia, Mimosa, Medicajo, Glycine, Dolichos, Phaseolus, Soja e.g. the species Pisum sativum, Pisum arvense, Pisum humile [pea], Albizia berteriana, Albizia julibrissin, Albizia lebbeck, Acacia berteriana, Acacia littoralis, Albizia berteriana, Albizzia berteriana, Cathormion berteriana, Feuillea berteriana, Inga fragrans, Pithecellobium berterianum, Pithecellobium fragrans, Pithecolobium berterianum, Pseudalbizzia berteriana, Acacia julibrissin, Acacia nemu, Albizia nemu, Feuilleea julibrissin, Mimosa julibrissin, Mimosa speciosa, Sericanrda julibrissin, Acacia lebbeck, Acacia macrophylla, Albizia lebbek, Feuilleea lebbeck, Mimosa lebbeck, Mimosa speciosa [bastard logwood, silk tree, East Indian Walnut], Medicago sativa, Medicago falcata, Medicago varia [alfalfa] Glycine max Dolichos soja, Glycine gracilis, Glycine hispida, Phaseolus max, Soja hispida or Soja max [soybean]; Geraniaceae such as the genera Pelargonium, Cocos, Oleum e.g. the species Cocos nucifera, Pelargonium grossularioides or Oleum cocois [coconut]; Gramineae such as the genera Saccharum e.g. the species Saccharum officinarum; Juglandaceae such as the genera Juglans, Wallia e.g. the species Juglans regia, Juglans ailanthifolia, Juglans sieboldiana, Juglans cinerea, Wallia cinerea, Juglans bixbyi, Juglans californica, Juglans hindsii, Juglans intermedia, Juglans jamaicensis, Juglans major, Juglans microcarpa, Juglans nigra or Wallia nigra [walnut, black walnut, common walnut, persian walnut, white walnut, butternut, black walnut]; Lauraceae such as the genera Persea, Laurus e.g. the species laurel Laurus nobilis [bay, laurel, bay laurel, sweet bay], Persea americana Persea americana, Persea gratissima or Persea persea [avocado]; Leguminosae such as the genera Arachis e.g. the species Arachis hypogaea [peanut]; Linaceae such as the genera Linum, Adenolinum e.g. the species Linum usitatissimum, Linum humile, Linum austriacum, Linum bienne, Linum angustifolium, Linum catharticum, Linum flavum, Linum grandiflorum, Adenolinum grandiflorum, Linum lewisii, Linum narbonense, Linum perenne, Linum perenne var. lewisii, Linum pratense or Linum trigynum [flax, linseed]; Lythrarieae such as the genera Punica e.g. the species Punica granatum [pomegranate]; Malvaceae such as the genera Gossypium e.g. the species Gossypium hirsutum, Gossypium arboreum, Gossypium barbadense, Gossypium herbaceum or Gossypium thurberi [cotton]; Musaceae such as the genera Musa e.g. the species Musa nana, Musa acuminata, Musa paradisiaca, Musa spp. [banana]; Onagraceae such as the genera Camissonia, Oenothera e.g. the species Oenothera biennis or Camissonia brevipes [primrose, evening primrose]; Palmae such as the genera Elacis e.g. the species Elaeis guineensis [oil plam]; Papaveraceae such as the genera Papaver e.g. the species Papaver orientale, Papaver rhoeas, Papaver dubium [poppy, oriental poppy, corn poppy, field poppy, shirley poppies, field poppy, long-headed poppy, long-pod poppy]; Pedaliaceae such as the genera Sesamum e.g. the species Sesamum indicum [sesame]; Piperaceae such as the genera Piper, Artanthe, Peperomia, Steffensia e.g. the species Piper aduncum, Piper amalago, Piper angustifolium, Piper auritum, Piper betel, Piper cubeba, Piper longum, Piper nigrum, Piper retrofractum, Artanthe adunca, Artanthe elongata, Peperomia elongata, Piper elongatum, Steffensia elongata. [Cayenne pepper, wild pepper]; Poaceae such as the genera Hordeum, Secale, Avena, Sorghum, Andropogon, Holcus, Panicum, Oryza, Zea, Triticum e.g. the species Hordeum vulgare, Hordeum jubatum, Hordeum murinum, Hordeum secalinum, Hordeum distichon Hordeum aegiceras, Hordeum hexastichon., Hordeum hexastichum, Hordeum irregulare, Hordeum sativum, Hordeum secalinum [barley, pearl barley, foxtail barley, wall barley, meadow barley], Secale cereale [rye], Avena sativa, Avena fatua, Avena byzantina, Avena fatua var. sativa, Avena hybrida [oat], Sorghum bicolor, Sorghum halepense, Sorghum saccharatum, Sorghum vulgare, Andropogon drummondii, Holcus bicolor, Holcus sorghum, Sorghum aethiopicum, Sorghum arundinaceum, Sorghum caffrorum, Sorghum cernuum, Sorghum dochna, Sorghum drummondii, Sorghum durra, Sorghum guineense, Sorghum lanceolatum, Sorghum nervosum, Sorghum saccharatum, Sorghum subglabrescens, Sorghum verticilliflorum, Sorghum vulgare, Holcus halepensis, Sorghum miliaceum millet, Panicum militaceum [Sorghum, millet], Oryza sativa, Oryza latifolia [rice], Zea mays [corn, maize] Triticum aestivum, Triticum durum, Triticum turgidum, Triticum hybernum, Triticum macha, Triticum sativum or Triticum vulgare [wheat, bread wheat, common wheat], Proteaceae such as the genera Macadamia e.g. the species Macadamia intergrifolia [macadamia]; Rubiaceae such as the genera Coffea e.g. the species Cofea spp., Coffea arabica, Coffea canephora or Coffea liberica [coffee]; Scrophulariaceae such as the genera Verbascum e.g. the species Verbascum blattaria, Verbascum chaixii, Verbascum densiflorum, Verbascum lagurus, Verbascum longifolium, Verbascum lychnitis, Verbascum nigrum, Verbascum olympicum, Verbascum phlomoides, Verbascum phoenicum, Verbascum pulverulentum or Verbascum thapsus [mullein, white moth mullein, nettle-leaved mullein, dense-flowered mullein, silver mullein, long-leaved mullein, white mullein, dark mullein, greek mullein, orange mullein, purple mullein, hoary mullein, great mullein]; Solanaceae such as the genera Capsicum, Nicotiana, Solanum, Lycopersicon e.g. the species Capsicum annuum, Capsicum annuum var. glabriusculum, Capsicum frutescens [pepper], Capsicum annuum [paprika], Nicotiana tabacum, Nicotiana alata, Nicotiana attenuata, Nicotiana glauca, Nicotiana langsdorffii, Nicotiana obtusifolia, Nicotiana quadrivalvis, Nicotiana repanda, Nicotiana rustica, Nicotiana sylvestris [tobacco], Solanum tuberosum [potato], Solanum melongena [egg-plant] (Lycopersicon esculentum, Lycopersicon lycopersicum., Lycopersicon pyriforme, Solanum integrifolium or Solanum lycopersicum [tomato]; Sterculiaceae such as the genera Theobroma e.g. the species Theobroma cacao [cacao]; Theaceae such as the genera Camellia e.g. the species Camellia sinensis) [tea].

[0230] The introduction of the nucleic acids according to the invention, the expression cassette or the vector into organisms, plants for example, can in principle be done by all of the methods known to those skilled in the art. The introduction of the nucleic acid sequences gives rise to recombinant or transgenic organisms.

[0231] Unless otherwise specified, the terms “polynucleotides”, “nucleic acid” and “nucleic acid molecule” as used herein are interchangeably. Unless otherwise specified, the terms “peptide”, “polypeptide” and “protein” are interchangeably in the present context. The term “sequence” may relate to polynucleotides, nucleic acids, nucleic acid molecules, peptides, polypeptides and proteins, depending on the context in which the term “sequence” is used. The terms “gene(s)”, “polynucleotide”, “nucleic acid sequence”, “nucleotide sequence”, or “nucleic acid molecule(s)” as used herein refers to a polymeric form of nucleotides of any length, either ribonucleotides or deoxyribonucleotides. The terms refer only to the primary structure of the molecule.

[0232] Thus, the terms “gene(s)”, “polynucleotide”, “nucleic acid sequence”, “nucleotide sequence”, or “nucleic acid molecule(s)” as used herein include double- and single-stranded DNA and RNA. They also include known types of modifications, for example, methylation, “caps”, substitutions of one or more of the naturally occurring nucleotides with an analog. Preferably, the DNA or RNA sequence of the invention comprises a coding sequence encoding the herein defined polypeptide.

[0233] The genes of the invention, coding for an activity selected from the group consisting of: phosphoenolpyruvate carboxylkinase, arginine/alanine aminopeptidase, D-alanyl-D-alanine carboxypeptidase, diacylglycerol pyrophosphate phosphatase, dityrosine transporter, farnesyl-diphosphate farnesyl transferase, NAD+-dependent betaine aldehyde dehydrogenase, serine hydrolase, transcriptional regulator involved in conferring resistance to ketoconazole, uridine kinase, yal043c-a-protein, ybr071w-protein, and ydr445c-protein are also called “YSRP gene” or “YRP gene”.

[0234] A “coding sequence” is a nucleotide sequence, which is transcribed into mRNA and/or translated into a polypeptide when placed under the control of appropriate regulatory sequences. The boundaries of the coding sequence are determined by a translation start codon at the 5′-terminus and a translation stop codon at the 3′-terminus. A coding sequence can include, but is not limited to mRNA, cDNA, recombinant nucleotide sequences or genomic DNA, while introns may be present as well under certain circumstances.

[0235] The transfer of foreign genes into the genome of a plant is called transformation. In doing this the methods described for the transformation and regeneration of plants from plant tissues or plant cells are utilized for transient or stable transformation. Suitable methods are protoplast transformation by poly(ethylene glycol)-induced DNA uptake, the “biolistic” method using the gene cannon—referred to as the particle bombardment method, electroporation, the incubation of dry embryos in DNA solution, microinjection and gene transfer mediated by Agrobacterium. Said methods are described by way of example in B. Jenes et al., Techniques for Gene Transfer, in: Trans-genic Plants, Vol. 1, Engineering and Utilization, eds. S. D. Kung and R. Wu, Academic Press (1993) 128-143 and in Potrykus Annu. Rev. Plant Physiol. Plant Molec. Biol. 42 (1991) 205-225). The nucleic acids or the construct to be expressed is preferably cloned into a vector which is suitable for transforming Agrobacterium tumefaciens, for example pBin19 (Bevan et al., Nucl. Acids Res. 12 (1984) 8711). Agrobacteria trans-formed by such a vector can then be used in known manner for the transformation of plants, in particular of crop plants such as by way of example tobacco plants, for example by bathing bruised leaves or chopped leaves in an agrobacterial solution and then culturing them in suitable media. The transformation of plants by means of Agrobacterium tumefaciens is described, for example, by Höfgen and Willmitzer in Nucl. Acid Res. (1988) 16, 9877 or is known inter alia from F. F. White, Vectors for Gene Transfer in Higher Plants; in Transgenic Plants, Vol. 1, Engineering and Utilization, eds. S. D. Kung and R. Wu, Academic Press, 1993, pp. 15-38.

[0236] Agrobacteria transformed by an expression vector according to the invention may likewise be used in known manner for the transformation of plants such as test plants like Arabidopsis or crop plants such as cereal crops, corn, oats, rye, barley, wheat, soybean, rice, cotton, sugar beet, canola, sunflower, flax, hemp, potatoes, tobacco, tomatoes, carrots, paprika, oilseed rape, tapioca, cassava, arrowroot, tagetes, alfalfa, lettuce and the various tree, nut and vine species, in particular of oil-containing crop plants such as soybean, peanut, castor oil plant, sunflower, corn, cotton, flax, oilseed rape, coconut, oil palm, safflower (Carthamus tinctorius) or cocoa bean, e.g. by bathing bruised leaves or chopped leaves in an agrobacterial solution and then culturing them in suitable media.

The genetically modified plant cells may be regenerated by all of the methods known to those skilled in the art. Appropriate methods can be found in the publications referred to above by S. D. Kung and R. Wu, Potrykus or Höfgen and Willmitzer.

[0237] Accordingly, a further aspect of the invention relates to transgenic organisms transformed by at least one nucleic acid sequence, expression cassette or vector according to the invention as well as cells, cell cultures, tissue, parts—such as, for example, leaves, roots, etc. in the case of plant organisms—or reproductive material derived from such organisms. The terms “host organism”, “host cell”, “recombinant (host) organism” and “transgenic (host) cell” are used here interchangeably. Of course these terms relate not only to the particular host organism or the particular target cell but also to the descendants or potential descendants of these organisms or cells. Since, due to mutation or environmental effects certain modifications may arise in successive generations, these descendants need not necessarily be identical with the parental cell but nevertheless are still encompassed by the term as used here.

For the purposes of the invention “transgenic” or “recombinant” means with regard for example to a nucleic acid sequence, an expression cassette (=gene construct, nucleic acid construct) or a vector containing the nucleic acid sequence according to the invention or an organism transformed by the nucleic acid sequences, expression cassette or vector according to the invention all those constructions produced by genetic engineering methods in which either
a) the nucleic acid sequence depicted in table I, column 5 or 7 or its derivatives or parts thereof or
b) a genetic control sequence functionally linked to the nucleic acid sequence described under (a), for example a 3′-and/or 5′-genetic control sequence such as a promoter or terminator, or
c) (a) and (b)
are not found in their natural, genetic environment or have been modified by genetic engineering methods, wherein the modification may by way of example be a substitution, addition, deletion, inversion or insertion of one or more nucleotide residues. Natural genetic environment means the natural genomic or chromosomal locus in the organism of origin or inside the host organism or presence in a genomic library. In the case of a genomic library the natural genetic environment of the nucleic acid sequence is preferably retained at least in part. The environment borders the nucleic acid sequence at least on one side and has a sequence length of at least 50 bp, preferably at least 500 bp, particularly preferably at least 1,000 bp, most particularly preferably at least 5,000 bp. A naturally occurring expression cassette—for example the naturally occurring combination of the natural promoter of the nucleic acid sequence according to the invention with the corresponding delta-8-desaturase, delta-9-elongase and/or delta-5-desaturase gene—turns into a transgenic expression cassette when the latter is modified by unnatural, synthetic (“artificial”) methods such as by way of example a mutagenation. Appropriate methods are described by way of example in U.S. Pat. No. 5,565,350 or WO 00/15815.

[0238] Suitable organisms or host organisms for the nucleic acid, expression cassette or vector according to the invention are advantageously in principle all organisms, which are suitable for the expression of recombinant genes as described above. Further examples which may be mentioned are plants such as Arabidopsis, Asteraceae such as Calendula or crop plants such as soybean, peanut, castor oil plant, sunflower, flax, corn, cotton, flax, oilseed rape, coconut, oil palm, safflower (Carthamus tinctorius) or cocoa bean.

In one embodiment of the invention host plants for the nucleic acid, expression cassette or vector according to the invention are selected from the group comprising corn, soy, oil seed rape (including canola and winter oil seed reap), cotton, wheat and rice.

[0239] A further object of the invention relates to the use of a nucleic acid construct, e.g. an expression cassette, containing DNA sequences encoding polypeptides shown in table II or DNA sequences hybridizing therewith for the transformation of plant cells, tissues or parts of plants.

In doing so, depending on the choice of promoter, the sequences of shown in table I can be expressed specifically in the leaves, in the seeds, the nodules, in roots, in the stem or other parts of the plant. Those transgenic plants overproducing sequences as depicted in table I, the reproductive material thereof, together with the plant cells, tissues or parts thereof are a further object of the present invention.
The expression cassette or the nucleic acid sequences or construct according to the invention containing sequences according to table I can, moreover, also be employed for the transformation of the organisms identified by way of example above such as bacteria, yeasts, filamentous fungi and plants.

[0240] Within the framework of the present invention, increased tolerance and/or resistance to environmental stress means, for example, the artificially acquired trait of increased environmental stress resistance due to functional over expression of polypeptide sequences of table II encoded by the corresponding nucleic acid molecules as depicted in table I, column 5 or 7 and/or homologs in the organisms according to the invention, advantageously in the transgenic plants according to the invention, by comparison with the nongenetically modified initial plants at least for the duration of at least one plant generation.

[0241] A constitutive expression of the polypeptide sequences of the of table II encoded by the corresponding nucleic acid molecule as depicted in table I, column 5 or 7 and/or homologs is, moreover, advantageous. On the other hand, however, an inducible expression may also appear desirable. Expression of the polypeptide sequences of the invention can be either direct to the cytoplasm or the organelles preferably the plastids of the host cells, preferably the plant cells.

The efficiency of the expression of the sequences of the of table II encoded by the corresponding nucleic acid molecule as depicted in table I, column 5 or 7 and/or homologs can be determined, for example, in vitro by shoot meristem propagation. In addition, an expression of the sequences of table II encoded by the corresponding nucleic acid molecule as depicted in table I, column 5 or 7 and/or homologs modified in nature and level and its effect on the metabolic pathways performance can be tested on test plants in greenhouse trials.

[0242] An additional object of the invention comprises transgenic organisms such as transgenic plants transformed by an expression cassette containing sequences of as depicted in table I, column 5 or 7 according to the invention or DNA sequences hybridizing therewith, as well as transgenic cells, tissue, parts and reproduction material of such plants. Particular preference is given in this case to transgenic crop plants such as by way of example barley, wheat, rye, oats, corn, soybean, rice, cotton, sugar beet, oilseed rape and canola, sunflower, flax, hemp, thistle, potatoes, tobacco, tomatoes, tapioca, cassava, arrowroot, alfalfa, lettuce and the various tree, nut and vine species.

In one embodiment of the invention transgenic plants transformed by an expression cassette containing sequences of as depicted in table I, column 5 or 7 according to the invention or DNA sequences hybridizing therewith are selected from the group comprising corn, soy, oil seed rape (including canola and winter oil seed rape), cotton, wheat and rice.

[0243] For the purposes of the invention plants are mono- and dicotyledonous plants, mosses or algae.

A further refinement according to the invention are transgenic plants as described above which contain a nucleic acid sequence or construct according to the invention or a expression cassette according to the invention.

[0244] However, transgenic also means that the nucleic acids according to the invention are located at their natural position in the genome of an organism, but that the sequence has been modified in comparison with the natural sequence and/or that the regulatory sequences of the natural sequences have been modified. Preferably, transgenic/recombinant is to be understood as meaning the transcription of the nucleic acids of the invention and shown in table I, occurs at a non-natural position in the genome, that is to say the expression of the nucleic acids is homologous or, preferably, heterologous. This expression can be transiently or of a sequence integrated stably into the genome.

The term “transgenic plants” used in accordance with the invention also refers to the progeny of a transgenic plant, for example the T₁, T₂, T₃ and subsequent plant generations or the BC₁, BC₂, BC₃ and subsequent plant generations. Thus, the transgenic plants according to the invention can be raised and selfed or crossed with other individuals in order to obtain further transgenic plants according to the invention. Trans-genic plants may also be obtained by propagating transgenic plant cells vegetatively. The present invention also relates to transgenic plant material, which can be derived from a transgenic plant population according to the invention. Such material includes plant cells and certain tissues, organs and parts of plants in all their manifestations, such as seeds, leaves, anthers, fibers, tubers, roots, root hairs, stems, embryo, calli, cotelydons, petioles, harvested material, plant tissue, reproductive tissue and cell cultures, which are derived from the actual transgenic plant and/or can be used for bringing about the transgenic plant.
Any transformed plant obtained according to the invention can be used in a conventional breeding scheme or in in vitro plant propagation to produce more transformed plants with the same characteristics and/or can be used to introduce the same characteristic in other varieties of the same or related species. Such plants are also part of the invention. Seeds obtained from the transformed plants genetically also contain the same characteristic and are part of the invention. As mentioned before, the present invention is in principle applicable to any plant and crop that can be transformed with any of the transformation method known to those skilled in the art.

[0245] Advantageous inducible plant promoters are by way of example the PRP1 promoter [Ward et al., Plant. Mol. Biol. 22 (1993), 361-366], a promoter inducible by benzenesulfonamide (EP 388 186), a promoter inducible by tetracycline [Gatz et al., (1992) Plant J. 2,397-404], a promoter inducible by salicylic acid (WO 95/19443), a promoter inducible by abscisic acid (EP 335 528) and a promoter inducible by ethanol or cyclohexanone (WO93/21334). Other examples of plant promoters which can advantageously be used are the promoter of cytosolic FBPase from potato, the ST-LSI promoter from potato (Stockhaus et al., EMBO J. 8 (1989) 2445-245), the promoter of phosphoribosyl pyrophosphate amidotransferase from Glycine max (see also gene bank accession number U87999) or a nodiene-specific promoter as described in EP 249 676. Particular advantageous are those promoters which ensure expression expression upon the early onset of environmental stress like for example drought or cold.

In one embodiment seed-specific promoters may be used for monocotylodonous or dicotylodonous plants.

[0246] In principle all natural promoters with their regulation sequences can be used like those named above for the expression cassette according to the invention and the method according to the invention. Over and above this, synthetic promoters may also advantageously be used.

In the preparation of an expression cassette various DNA fragments can be manipulated in order to obtain a nucleotide sequence, which usefully reads in the correct direction and is equipped with a correct reading frame. To connect the DNA fragments (=nucleic acids according to the invention) to one another adaptors or linkers may be attached to the fragments.
The promoter and the terminator regions can usefully be provided in the transcription direction with a linker or polylinker containing one or more restriction points for the insertion of this sequence. Generally, the linker has 1 to 10, mostly 1 to 8, preferably 2 to 6, restriction points. In general the size of the linker inside the regulatory region is less than 100 bp, frequently less than 60 bp, but at least 5 bp. The promoter may be both native or homologous as well as foreign or heterologous to the host organism, for example to the host plant. In the 5′-3′ transcription direction the expression cassette contains the promoter, a DNA sequence which shown in table I and a region for transcription termination. Different termination regions can be exchanged for one another in any desired fashion.

[0247] As also used herein, the terms “nucleic acid” and “nucleic acid molecule” are intended to include DNA molecules (e.g., cDNA or genomic DNA) and RNA molecules (e.g., mRNA) and analogs of the DNA or RNA generated using nucleotide analogs. This term also encompasses untranslated sequence located at both the 3′ and 5′ ends of the coding region of the gene: at least about 1000 nucleotides of sequence upstream from the 5′ end of the coding region and at least about 200 nucleotides of sequence downstream from the 3′ end of the coding region of the gene. The nucleic acid molecule can be single-stranded or double-stranded, but preferably is double-stranded DNA.

An “isolated” nucleic acid molecule is one that is substantially separated from other nucleic acid molecules, which are present in the natural source of the nucleic acid. That means other nucleic acid molecules are present in an amount less than 5% based on weight of the amount of the desired nucleic acid, preferably less than 2% by weight, more preferably less than 1% by weight, most preferably less than 0.5% by weight. Preferably, an “isolated” nucleic acid is free of some of the sequences that naturally flank the nucleic acid (i.e., sequences located at the 5′ and 3′ ends of the nucleic acid) in the genomic DNA of the organism from which the nucleic acid is derived. For example, in various embodiments, the isolated stress related protein encoding nucleic acid molecule can contain less than about 5 kb, 4 kb, 3 kb, 2 kb, 1 kb, 0.5 kb or 0.1 kb of nucleotide sequences which naturally flank the nucleic acid molecule in genomic DNA of the cell from which the nucleic acid is derived. Moreover, an “isolated” nucleic acid molecule, such as a cDNA molecule, can be free from some of the other cellular material with which it is naturally associated, or culture medium when produced by recombinant techniques, or chemical precursors or other chemicals when chemically synthesized.

[0248] A nucleic acid molecule of the present invention, e.g., a nucleic acid molecule encoding an YSRP or a portion thereof which confers tolerance and/or resistance to environmental stress and increased biomass production in plants, can be isolated using standard molecular biological techniques and the sequence information provided herein. For example, an Arabidopsis thaliana stress related protein encoding cDNA can be isolated from a A. thaliana c-DNA library or a Synechocystis sp., Brassica napus, Glycine max, Zea mays or Oryza sativa stress related protein encoding cDNA can be isolated from a Synechocystis sp., Brassica napus, Glycine max, Zea mays or Oryza sativa c-DNA library respectively using all or portion of one of the sequences shown in table I. Moreover, a nucleic acid molecule encompassing all or a portion of one of the sequences of table I can be isolated by the polymerase chain reaction using oligonucleotide primers designed based upon this sequence. For example, mRNA can be isolated from plant cells (e.g., by the guanidinium-thiocyanate extraction procedure of Chirgwin et al., 1979 Biochemistry 18:5294-5299) and cDNA can be prepared using reverse transcriptase (e.g., Moloney M L V reverse transcriptase, available from Gibco/BRL, Bethesda, Md.; or AMV reverse transcriptase, available from Seikagaku America, Inc., St. Petersburg, Fla.). Synthetic oligonucleotide primers for polymerase chain reaction amplification can be designed based upon one of the nucleotide sequences shown in table I. A nucleic acid molecule of the invention can be amplified using cDNA or, alternatively, genomic DNA, as a template and appropriate oligonucleotide primers according to standard PCR amplification techniques. The nucleic acid molecule so amplified can be cloned into an appropriate vector and characterized by DNA sequence analysis. Furthermore, oligonucleotides corresponding to a YSRP encoding nucleotide sequence can be prepared by standard synthetic techniques, e.g., using an automated DNA synthesizer.

In a preferred embodiment, an isolated nucleic acid molecule of the invention comprises one of the nucleotide sequences shown in table I encoding the YSRP (i.e., the “coding region”), as well as 5′ untranslated sequences and 3′ untranslated sequences.
Moreover, the nucleic acid molecule of the invention can comprise only a portion of the coding region of one of the sequences of the nucleic acid of table I, for example, a fragment which can be used as a probe or primer or a fragment encoding a biologically active portion of a YSRP.

[0249] Portions of proteins encoded by the YSRP encoding nucleic acid molecules of the invention are preferably biologically active portions described herein. As used herein, the term “biologically active portion of” a YSRP is intended to include a portion, e.g., a domain/motif, of stress related protein that participates in a stress tolerance and/or resistance response in a plant. To determine whether a YSRP, or a biologically active portion thereof, results in increased stress tolerance in a plant, a stress analysis of a plant comprising the YSRP may be performed. Such analysis methods are well known to those skilled in the art, as detailed in the Examples. More specifically, nucleic acid fragments encoding biologically active portions of a YSRP can be prepared by isolating a portion of one of the sequences of the nucleic acid of table I expressing the encoded portion of the YSRP or peptide (e.g., by recombinant expression in vitro) and assessing the activity of the encoded portion of the YSRP or peptide.

Biologically active portions of a YSRP are encompassed by the present invention and include peptides comprising amino acid sequences derived from the amino acid sequence of a YSRP encoding gene, or the amino acid sequence of a protein homologous to a YSRP, which include fewer amino acids than a full length YSRP or the full length protein which is homologous to a YSRP, and exhibits at least some enzymatic or biological activity of a YSRP. Typically, biologically active portions (e.g., peptides which are, for example, 5, 10, 15, 20, 30, 35, 36, 37, 38, 39, 40, 50, 100 or more amino acids in length) comprise a domain or motif with at least one activity of a YSRP. Moreover, other biologically active portions in which other regions of the protein are deleted, can be prepared by recombinant techniques and evaluated for one or more of the activities described herein. Preferably, the biologically active portions of a YSRP include one or more selected domains/motifs or portions thereof having biological activity.
The term “biological active portion” or “biological activity” means a polypeptide as depicted in table II, column 3 or a portion of said polypeptide which still has at least 10% or 20%, preferably 20%, 30%, 40% or 50%, especially preferably 60%, 70% or 80% of the enzymatic or biological activity of the natural or starting enzyme or protein.

[0250] In the process according to the invention nucleic acid sequences can be used, which, if appropriate, contain synthetic, non-natural or modified nucleotide bases, which can be incorporated into DNA or RNA. Said synthetic, non-natural or modified bases can for example increase the stability of the nucleic acid molecule outside or inside a cell. The nucleic acid molecules of the invention can contain the same modifications as aforementioned.

[0251] As used in the present context the term “nucleic acid molecule” may also encompass the untranslated sequence located at the 3′ and at the 5′ end of the coding gene region, for example at least 500, preferably 200, especially preferably 100, nucleotides of the sequence upstream of the 5′ end of the coding region and at least 100, preferably 50, especially preferably 20, nucleotides of the sequence downstream of the 3′ end of the coding gene region. It is often advantageous only to choose the coding region for cloning and expression purposes.

[0252] Preferably, the nucleic acid molecule used in the process according to the invention or the nucleic acid molecule of the invention is an isolated nucleic acid molecule.

[0253] An “isolated” polynucleotide or nucleic acid molecule is separated from other polynucleotides or nucleic acid molecules, which are present in the natural source of the nucleic acid molecule. An isolated nucleic acid molecule may be a chromosomal fragment of several kb, or preferably, a molecule only comprising the coding region of the gene. Accordingly, an isolated nucleic acid molecule of the invention may comprise chromosomal regions, which are adjacent 5′ and 3′ or further adjacent chromosomal regions, but preferably comprises no such sequences which naturally flank the nucleic acid molecule sequence in the genomic or chromosomal context in the organism from which the nucleic acid molecule originates (for example sequences which are adjacent to the regions encoding the 5′-and 3′-UTRs of the nucleic acid molecule). In various embodiments, the isolated nucleic acid molecule used in the process according to the invention may, for example comprise less than approximately 5 kb, 4 kb, 3 kb, 2 kb, 1 kb, 0.5 kb or 0.1 kb nucleotide sequences which naturally flank the nucleic acid molecule in the genomic DNA of the cell from which the nucleic acid molecule originates.

[0254] The nucleic acid molecules used in the process, for example the polynucleotide of the invention or of a part thereof can be isolated using molecular-biological standard techniques and the sequence information provided herein. Also, for example a homologous sequence or homologous, conserved sequence regions at the DNA or amino acid level can be identified with the aid of comparison algorithms. The former can be used as hybridization probes under standard hybridization techniques (for example those described in Sambrook et al., Molecular Cloning: A Laboratory Manual. 2nd Ed., Cold Spring Harbor Laboratory, Cold Spring Harbor Laboratory Press, Cold Spring Harbor, N.Y., 1989) for isolating further nucleic acid sequences useful in this process.

[0255] A nucleic acid molecule encompassing a complete sequence of the nucleic acid molecules used in the process, for example the polynucleotide of the invention, or a part thereof may additionally be isolated by polymerase chain reaction, oligonucleotide primers based on this sequence or on parts thereof being used. For example, a nucleic acid molecule comprising the complete sequence or part thereof can be isolated by polymerase chain reaction using oligonucleotide primers which have been generated on the basis of this very sequence. For example, mRNA can be isolated from cells (for example by means of the guanidinium thiocyanate extraction method of Chirgwin et al. (1979) Biochemistry 18:5294-5299) and cDNA can be generated by means of reverse transcriptase (for example Moloney M L V reverse transcriptase, available from Gibco/BRL, Bethesda, Md., or AMV reverse transcriptase, obtainable from Seikagaku America, Inc., St. Petersburg, Fla.).

[0256] Synthetic oligonucleotide primers for the amplification, e.g. as shown in table III, column 7, by means of polymerase chain reaction can be generated on the basis of a sequence shown herein, for example the sequence shown in table I, columns 5 and 7 or the sequences derived from table II, columns 5 and 7.

[0257] Moreover, it is possible to identify conserved protein by carrying out protein sequence alignments with the polypeptide encoded by the nucleic acid molecules of the present invention, in particular with the sequences encoded by the nucleic acid molecule shown in, column 5 or 7 of Table I, from which conserved regions, and in turn, degenerate primers can be derived.

Conserved regions are those, which show a very little variation in the amino acid in one particular position of several homologs from different origin. The consensus sequence and polypeptide motifs shown in column 7 of Table IV are derived from said alignments. Moreover, it is possible to identify conserved regions from various organisms by carrying out protein sequence alignments with the polypeptide encoded by the nucleic acid of the present invention, in particular with the sequences encoded by the polypeptide molecule shown in column 5 or 7 of Table II, from which conserved regions, and in turn, degenerate primers can be derived.
In one advantageous embodiment, in the method of the present invention the activity of a polypeptide is increased comprising or consisting of a consensus sequence or a polypeptide motif shown in table IV column 7 and in one another embodiment, the present invention relates to a polypeptide comprising or consisting of a consensus sequence or a polypeptide motif shown in table IV, column 7 whereby 20 or less, preferably 15 or 10, preferably 9, 8, 7, or 6, more preferred 5 or 4, even more preferred 3, even more preferred 2, even more preferred 1, most preferred 0 of the amino acids positions indicated can be replaced by any amino acid. In one embodiment not more than 15%, preferably 10%, even more preferred 5%, 4%, 3%, or 2%, most preferred 1% or 0% of the amino acid position indicated by a letter are/is replaced another amino acid. In one embodiment 20 or less, preferably 15 or 10, preferably 9, 8, 7, or 6, more preferred 5 or 4, even more preferred 3, even more preferred 2, even more preferred 1, most preferred 0 amino acids are inserted into a consensus sequence or protein motif.
The consensus sequence was derived from a multiple alignment of the sequences as listed in table II. The letters represent the one letter amino acid code and indicate that the amino acids are conserved in at least 80% of the aligned proteins, whereas the letter X stands for amino acids, which are not conserved in at least 80% of the aligned sequences. The consensus sequence starts with the first conserved amino acid in the alignment, and ends with the last conserved amino acid in the alignment of the investigated sequences. The number of given X indicates the distances between conserved amino acid residues, e.g. Y-x(21,23)-F means that conserved tyrosine and phenylalanine residues in the alignment are separated from each other by minimum 21 and maximum 23 amino acid residues in the alignment of all investigated sequences.
Conserved domains were identified from all sequences and are described using a subset of the standard Prosite notation, e.g the pattern Y-x(21,23)-[FW] means that a conserved tyrosine is separated by minimum 21 and maximum 23 amino acid residues from either a phenylalanine or tryptophane. Patterns had to match at least 80% of the investigated proteins.
Conserved patterns were identified with the software tool MEME version 3.5.1 or manually. MEME was developed by Timothy L. Bailey and Charles Elkan, Dept. of Computer Science and Engineering, University of California, San Diego, USA and is described by Timothy L. Bailey and Charles Elkan [Fitting a mixture model by expectation maximization to discover motifs in biopolymers, Proceedings of the Second International Conference on Intelligent Systems for Molecular Biology, pp. 28-36, AAAI Press, Menlo Park, Calif., 1994]. The source code for the stand-alone program is public available from the San Diego Supercomputer center (http://meme.sdsc.edu).
For identifying common motifs in all sequences with the software tool MEME, the following settings were used: -maxsize 500000, -nmotifs 15, -evt 0.001, -maxw 60, distance 1e-3, -minsites number of sequences used for the analysis. Input sequences for MEME were non-aligned sequences in Fasta format. Other parameters were used in the default settings in this software version.
Prosite patterns for conserved domains were generated with the software tool Pratt version 2.1 or manually. Pratt was developed by Inge Jonassen, Dept. of Informatics, University of Bergen, Norway and is described by Jonassen et al. [I. Jonassen, J. F. Collins and D. G. Higgins, Finding flexible patterns in unaligned protein sequences, Protein Science 4 (1995), pp. 1587-1595; I. Jonassen, Efficient discovery of conserved patterns using a pattern graph, Submitted to CABIOS February 1997]. The source code (ANSI C) for the stand-alone program is public available, e.g. at establisched Bioinformatic centers like EBI (European Bioinformatics Institute).
For generating patterns with the software tool Pratt, following settings were used: PL (max Pattern Length): 100, PN (max Nr of Pattern Symbols): 100, PX (max Nr of consecutive x's): 30, FN (max Nr of flexible spacers): 5, FL (max Flexibility): 30, FP (max Flex.Product): 10, ON (max number patterns): 50. Input sequences for Pratt were distinct regions of the protein sequences exhibiting high similarity as identified from software tool MEME. The minimum number of sequences, which have to match the generated patterns (CM, min Nr of Seqs to Match) was set to at least 80% of the provided sequences. Parameters not mentioned here were used in their default settings.
The Prosite patterns of the conserved domains can be used to search for protein sequences matching this pattern. Various establisched Bioinformatic centers provide public Internet portals for using those patterns in database searches (e.g. PIR [Protein Information Resource, located at Georgetown University Medical Center] or ExPASy [Expert Protein Analysis System]). Alternatively, stand-alone software is available, like the program Fuzzpro, which is part of the EMBOSS software package. For example, the program Fuzzpro not only allows to search for an exact pattern-protein match but also allows to set various ambiguities in the performed search.
The alignment was performed with the software ClustalW (version 1.83) and is described by Thompson et al. [Thompson, J. D., Higgins, D. G. and Gibson, T. J. (1994) CLUSTAL W: improving the sensitivity of progressive multiple sequence alignment through sequence weighting, positions-specific gap penalties and weight matrix choice. Nucleic Acids Research, 22:4673-4680]. The source code for the stand-alone program is public available from the European Molecular Biology Laboratory; Heidelberg, Germany. The analysis was performed using the default parameters of ClustalW v1.83 (gap open penalty: 10.0; gap extension penalty: 0.2; protein matrix: Gonnet; pprotein/DNA endgap: −1; protein/DNA gapdist: 4).

[0258] Degenerated primers can then be utilized by PCR for the amplification of fragments of novel proteins having above-mentioned activity, e.g. conferring the increased yield, preferably under condition of transient and repetitive abiotic stress as compared to a corresponding non-transformed wild type plant cell, plant or part thereof after increasing the expression or activity or having the activity of a protein as shown in table II, column 3 or further functional homologs of the polypeptide of the invention from other organisms.

[0259] These fragments can then be utilized as hybridization probe for isolating the complete gene sequence. As an alternative, the missing 5′ and 3′ sequences can be isolated by means of RACE-PCR. A nucleic acid molecule according to the invention can be amplified using cDNA or, as an alternative, genomic DNA as template and suitable oligonucleotide primers, following standard PCR amplification techniques. The nucleic acid molecule amplified thus can be cloned into a suitable vector and characterized by means of DNA sequence analysis. Oligonucleotides, which correspond to one of the nucleic acid molecules used in the process can be generated by standard synthesis methods, for example using an automatic DNA synthesizer.

[0260] Nucleic acid molecules which are advantageously for the process according to the invention can be isolated based on their homology to the nucleic acid molecules disclosed herein using the sequences or part thereof as hybridization probe and following standard hybridization techniques under stringent hybridization conditions. In this context, it is possible to use, for example, isolated nucleic acid molecules of at least 15, 20, 25, 30, 35, 40, 50, 60 or more nucleotides, preferably of at least 15, 20 or 25 nucleotides in length which hybridize under stringent conditions with the above-described nucleic acid molecules, in particular with those which encompass a nucleotide sequence of the nucleic acid molecule used in the process of the invention or encoding a protein used in the invention or of the nucleic acid molecule of the invention. Nucleic acid molecules with 30, 50, 100, 250 or more nucleotides may also be used.

[0261] The term “homology” means that the respective nucleic acid molecules or encoded proteins are functionally and/or structurally equivalent. The nucleic acid molecules that are homologous to the nucleic acid molecules described above and that are derivatives of said nucleic acid molecules are, for example, variations of said nucleic acid molecules which represent modifications having the same biological function, in particular encoding proteins with the same or substantially the same biological function. They may be naturally occurring variations, such as sequences from other plant varieties or species, or mutations. These mutations may occur naturally or may be obtained by mutagenesis techniques. The allelic variations may be naturally occurring allelic variants as well as synthetically produced or genetically engineered variants. Structurally equivalents can, for example, be identified by testing the binding of said polypeptide to antibodies or computer based predictions. Structurally equivalent have the similar immunological characteristic, e.g. comprise similar epitopes.

[0262] By “hybridizing” it is meant that such nucleic acid molecules hybridize under conventional hybridization conditions, preferably under stringent conditions such as described by, e.g., Sambrook (Molecular Cloning; A Laboratory Manual, 2nd Edition, Cold Spring Harbor Laboratory Press, Cold Spring Harbor, N.Y. (1989)) or in Current Protocols in Molecular Biology, John Wiley & Sons, N.Y. (1989), 6.3.1-6.3.6.

[0263] According to the invention, DNA as well as RNA molecules of the nucleic acid of the invention can be used as probes. Further, as template for the identification of functional homologues Northern blot assays as well as Southern blot assays can be performed. The Northern blot assay advantageously provides further informations about the expressed gene product: e.g. expression pattern, occurrence of processing steps, like splicing and capping, etc. The Southern blot assay provides additional information about the chromosomal localization and organization of the gene encoding the nucleic acid molecule of the invention.

[0264] A preferred, nonlimiting example of stringent hydridization conditions are hybridizations in 6× sodium chloride/sodium citrate (═SSC) at approximately 45° C., followed by one or more wash steps in 0.2×SSC, 0.1% SDS at 50 to 65° C., for example at 50° C., 55° C. or 60° C. The skilled worker knows that these hybridization conditions differ as a function of the type of the nucleic acid and, for example when organic solvents are present, with regard to the temperature and concentration of the buffer. The temperature under “standard hybridization conditions” differs for example as a function of the type of the nucleic acid between 42° C. and 58° C., preferably between 45° C. and 50° C. in an aqueous buffer with a concentration of 0.1×0.5 x, 1×, 2×, 3×, 4× or 5×SSC (pH 7.2). If organic solvent(s) is/are present in the abovementioned buffer, for example 50% formamide, the temperature under standard conditions is approximately 40° C., 42° C. or 45° C. The hybridization conditions for DNA:DNA hybrids are preferably for example 0.1×SSC and 20° C., 25° C., 30° C., 35° C., 40° C. or 45° C., preferably between 30° C. and 45° C. The hybridization conditions for DNA:RNA hybrids are preferably for example 0.1×SSC and 30° C., 35° C., 40° C., 45° C., 50° C. or 55° C., preferably between 45° C. and 55° C. The abovementioned hybridization temperatures are determined for example for a nucleic acid approximately 100 bp (=base pairs) in length and a G+C content of 50% in the absence of formamide. The skilled worker knows to determine the hybridization conditions required with the aid of textbooks, for example the ones mentioned above, or from the following textbooks: Sambrook et al., “Molecular Cloning”, Cold Spring Harbor Laboratory, 1989; Hames and Higgins (Ed.) 1985, “Nucleic Acids Hybridization: A Practical Approach”, IRL Press at Oxford University Press, Oxford; Brown (Ed.) 1991, “Essential Molecular Biology: A Practical Approach”, IRL Press at Oxford University Press, Oxford.

[0265] A further example of one such stringent hybridization condition is hybridization at 4×SSC at 65° C., followed by a washing in 0.1×SSC at 65° C. for one hour. Alternatively, an exemplary stringent hybridization condition is in 50% formamide, 4×SSC at 42° C. Further, the conditions during the wash step can be selected from the range of conditions delimited by low-stringency conditions (approximately 2×SSC at 50° C.) and high-stringency conditions (approximately 0.2×SSC at 50° C., preferably at 65° C.) (20×SSC: 0.3M sodium citrate, 3M NaCl, pH 7.0). In addition, the temperature during the wash step can be raised from low-stringency conditions at room temperature, approximately 22° C., to higher-stringency conditions at approximately 65° C. Both of the parameters salt concentration and temperature can be varied simultaneously, or else one of the two parameters can be kept constant while only the other is varied. Denaturants, for example formamide or SDS, may also be employed during the hybridization. In the presence of 50% formamide, hybridization is preferably effected at 42° C. Relevant factors like i) length of treatment, ii) salt conditions, iii) detergent conditions, iv) competitor DNAs, v) temperature and vi) probe selection can be combined case by case so that not all possibilities can be mentioned herein.

Thus, in a preferred embodiment, Northern blots are prehybridized with Rothi-Hybri-Quick buffer (Roth, Karlsruhe) at 68° C. for 2 h. Hybridzation with radioactive labelled probe is done overnight at 68° C. Subsequent washing steps are performed at 68° C. with 1×SSC.
For Southern blot assays the membrane is prehybridized with Rothi-Hybri-Quick buffer (Roth, Karlsruhe) at 68° C. for 2 h. The hybridzation with radioactive labelled probe is conducted over night at 68° C. Subsequently the hybridization buffer is discarded and the filter shortly washed using 2×SSC; 0,1% SDS. After discarding the washing buffer new 2×SSC; 0,1% SDS buffer is added and incubated at 68° C. for 15 minutes. This washing step is performed twice followed by an additional washing step using 1×SSC; 0,1% SDS at 68° C. for 10 min.

[0266] Some examples of conditions for DNA hybridization (Southern blot assays) and wash step are shown hereinbelow:
[0267] (1) Hybridization conditions can be selected, for example, from the following conditions:
[0268] a) 4×SSC at 65° C.,
[0269] b) 6×SSC at 45° C.,
[0270] c) 6×SSC, 100 mg/ml denatured fragmented fish sperm DNA at 68° C.,
[0271] d) 6×SSC, 0.5% SDS, 100 mg/ml denatured salmon sperm DNA at 68° C.,
[0272] e) 6×SSC, 0.5% SDS, 100 mg/ml denatured fragmented salmon sperm DNA, 50% formamide at 42° C.,
[0273] f) 50% formamide, 4×SSC at 42° C.,
[0274] g) 50% (vol/vol) formamide, 0.1% bovine serum albumin, 0.1% Ficoll, 0.1% polyvinylpyrrolidone, 50 mM sodium phosphate buffer pH 6.5, 750 mM NaCl, 75 mM sodium citrate at 42° C.,
[0275] h) 2× or 4×SSC at 50° C. (low-stringency condition), or
[0276] i) 30 to 40% formamide, 2× or 4×SSC at 42° C. (low-stringency condition).
[0277] (2) Wash steps can be selected, for example, from the following conditions:
[0278] a) 0.015 M NaCl/0.0015 M sodium citrate/0.1% SDS at 50° C.
[0279] b) 0.1×SSC at 65° C.
[0280] c) 0.1×SSC, 0.5% SDS at 68° C.
[0281] d) 0.1×SSC, 0.5% SDS, 50% formamide at 42° C.
[0282] e) 0.2×SSC, 0.1% SDS at 42° C.
[0283] f) 2×SSC at 65° C. (low-stringency condition).

[0284] Polypeptides having above-mentioned activity, i.e. conferring the increased yield, preferably under condition of transient and repetitive abiotic stress as compared to a corresponding non-transformed wild type plant cell, plant or part thereof, derived from other organisms, can be encoded by other DNA sequences which hybridize to the sequences shown in table I, columns 5 and 7 under relaxed hybridization conditions and which code on expression for peptides conferring the increased yield, preferably under condition of transient and repetitive abiotic stress as compared to a corresponding non-transformed wild type plant cell, plant or part thereof.

[0285] Further, some applications have to be performed at low stringency hybridisation conditions, without any consequences for the specificity of the hybridisation. For example, a Southern blot analysis of total DNA could be probed with a nucleic acid molecule of the present invention and washed at low stringency (55° C. in 2×SSPE, 0,1% SDS). The hybridisation analysis could reveal a simple pattern of only genes encoding polypeptides of the present invention or used in the process of the invention, e.g. having herein-mentioned activity of increasing the tolerance and/or resistance to environmental stress and the biomass production as compared to a corresponding non-transformed wild type plant cell, plant or part thereof. A further example of such low-stringent hybridization conditions is 4×SSC at 50° C. or hybridization with 30 to 40% formamide at 42° C. Such molecules comprise those which are fragments, analogues or derivatives of the polypeptide of the invention or used in the process of the invention and differ, for example, by way of amino acid and/or nucleotide deletion(s), insertion(s), substitution (s), addition(s) and/or recombination (s) or any other modification(s) known in the art either alone or in combination from the above-described amino acid sequences or their underlying nucleotide sequence(s). However, it is preferred to use high stringency hybridisation conditions.

[0286] Hybridization should advantageously be carried out with fragments of at least 5, 10, 15, 20, 25, 30, 35 or 40 bp, advantageously at least 50, 60, 70 or 80 bp, preferably at least 90, 100 or 110 bp. Most preferably are fragments of at least 15, 20, 25 or 30 bp. Preferably are also hybridizations with at least 100 bp or 200, very especially preferably at least 400 bp in length. In an especially preferred embodiment, the hybridization should be carried out with the entire nucleic acid sequence with conditions described above.

[0287] The terms “fragment”, “fragment of a sequence” or “part of a sequence” mean a truncated sequence of the original sequence referred to. The truncated sequence (nucleic acid or protein sequence) can vary widely in length; the minimum size being a sequence of sufficient size to provide a sequence with at least a comparable function and/or activity of the original sequence referred to or hybridizing with the nucleic acid molecule of the invention or used in the process of the invention under stringend conditions, while the maximum size is not critical. In some applications, the maximum size usually is not substantially greater than that required to provide the desired activity and/or function(s) of the original sequence.

[0288] Typically, the truncated amino acid sequence will range from about 5 to about 310 amino acids in length. More typically, however, the sequence will be a maximum of about 250 amino acids in length, preferably a maximum of about 200 or 100 amino acids. It is usually desirable to select sequences of at least about 10, 12 or 15 amino acids, up to a maximum of about 20 or 25 amino acids.

[0289] The term “epitope” relates to specific immunoreactive sites within an antigen, also known as antigenic determinates. These epitopes can be a linear array of monomers in a polymeric composition—such as amino acids in a protein—or consist of or comprise a more complex secondary or tertiary structure. Those of skill will recognize that immunogens (i.e., substances capable of eliciting an immune response) are antigens; however, some antigen, such as haptens, are not immunogens but may be made immunogenic by coupling to a carrier molecule. The term “antigen” includes references to a substance to which an antibody can be generated and/or to which the antibody is specifically immunoreactive.

[0290] In one embodiment the present invention relates to a epitope of the polypeptide of the present invention or used in the process of the present invention and confers an increased yield, preferably under condition of transient and repetitive abiotic stress as compared to a corresponding non-transformed wild type plant cell, plant or part thereof.

[0291] The term “one or several amino acids” relates to at least one amino acid but not more than that number of amino acids, which would result in a homology of below 50% identity. Preferably, the identity is more than 70% or 80%, more preferred are 85%, 90%, 91%, 92%, 93%, 94% or 95%, even more preferred are 96%, 97%, 98%, or 99% identity.

[0292] Further, the nucleic acid molecule of the invention comprises a nucleic acid molecule, which is a complement of one of the nucleotide sequences of above mentioned nucleic acid molecules or a portion thereof. A nucleic acid molecule which is complementary to one of the nucleotide sequences shown in table I, columns 5 and 7 is one which is sufficiently complementary to one of the nucleotide sequences shown in table I, columns 5 and 7 such that it can hybridize to one of the nucleotide sequences shown in table I, columns 5 and 7, thereby forming a stable duplex. Preferably, the hybridisation is performed under stringent hybridization conditions. However, a complement of one of the herein disclosed sequences is preferably a sequence complement thereto according to the base pairing of nucleic acid molecules well known to the skilled person. For example, the bases A and G undergo base pairing with the bases T and U or C, resp. and visa versa. Modifications of the bases can influence the base-pairing partner.

[0293] The nucleic acid molecule of the invention comprises a nucleotide sequence which is at least about 30%, 35%, 40% or 45%, preferably at least about 50%, 55%, 60% or 65%, more preferably at least about 70%, 80%, or 90%, and even more preferably at least about 95%, 97%, 98%, 99% or more homologous to a nucleotide sequence shown in table I, columns 5 and 7, or a portion thereof and preferably has above mentioned activity, in particular having a tolerance and/or resistance to environmental stress and biomass production increasing activity after increasing the activity or an activity of a gene product as shown in table II, column 3 by for example expression either in the cytsol or in an organelle such as a plastid or mitochondria or both, preferably in plastids.

[0294] The nucleic acid molecule of the invention comprises a nucleotide sequence which hybridizes, preferably hybridizes under stringent conditions as defined herein, to one of the nucleotide sequences shown in table I, columns 5 and 7, or a portion thereof and encodes a protein having above-mentioned activity, e.g. conferring an increased yield, preferably under condition of transient and repetitive abiotic stress as compared to a corresponding non-transformed wild type plant cell, plant or part thereof by for example expression either in the cytsol or in an organelle such as a plastid or mitochondria or both, preferably in plastids, and optionally, the activity selected from the group consisting of: phosphoenolpyruvate carboxylkinase, arginine/alanine aminopeptidase, D-alanyl-D-alanine carboxypeptidase, diacylglycerol pyrophosphate phosphatase, dityrosine transporter, farnesyl-diphosphate farnesyl transferase, NAD+-dependent betaine aldehyde dehydrogenase, serine hydrolase, transcriptional regulator involved in conferring resistance to ketoconazole, uridine kinase, yal043c-a-protein, ybr071w-protein, and ydr445c-protein.

[0295] Moreover, the nucleic acid molecule of the invention can comprise only a portion of the coding region of one of the sequences shown in table I, columns 5 and 7, for example a fragment which can be used as a probe or primer or a fragment encoding a biologically active portion of the polypeptide of the present invention or of a polypeptide used in the process of the present invention, i.e. having above-mentioned activity, e.g. conferring an increase of the tolerance and/or resistance to environmental stress and biomass production as compared to a corresponding non-transformed wild type plant cell, plant or part thereof if its activity is increased by for example expression either in the cytsol or in an organelle such as a plastid or mitochondria or both, preferably in plastids. The nucleotide sequences determined from the cloning of the present protein-according-to-the-invention-encoding gene allows for the generation of probes and primers designed for use in identifying and/or cloning its homologues in other cell types and organisms. The probe/primer typically comprises substantially purified oligonucleotide. The oligonucleotide typically comprises a region of nucleotide sequence that hybridizes under stringent conditions to at least about 12, 15 preferably about 20 or 25, more preferably about 40, 50 or 75 consecutive nucleotides of a sense strand of one of the sequences set forth, e.g., in table I, columns 5 and 7, an anti-sense sequence of one of the sequences, e.g., set forth in table I, columns 5 and 7, or naturally occurring mutants thereof. Primers based on a nucleotide of invention can be used in PCR reactions to clone homologues of the polypeptide of the invention or of the polypeptide used in the process of the invention, e.g. as the primers described in the examples of the present invention, e.g. as shown in the examples. A PCR with the primers shown in table III, column 7 will result in a fragment of the gene product as shown in table II, column 3.

[0296] Primer sets are interchangeable. The person skilled in the art knows to combine said primers to result in the desired product, e.g. in a full length clone or a partial sequence. Probes based on the sequences of the nucleic acid molecule of the invention or used in the process of the present invention can be used to detect transcripts or genomic sequences encoding the same or homologous proteins. The probe can further comprise a label group attached thereto, e.g. the label group can be a radioisotope, a fluorescent compound, an enzyme, or an enzyme co-factor. Such probes can be used as a part of a genomic marker test kit for identifying cells which express an polypeptide of the invention or used in the process of the present invention, such as by measuring a level of an encoding nucleic acid molecule in a sample of cells, e.g., detecting mRNA levels or determining, whether a genomic gene comprising the sequence of the polynucleotide of the invention or used in the process of the present invention has been mutated or deleted.

[0297] The nucleic acid molecule of the invention encodes a polypeptide or portion thereof which includes an amino acid sequence which is sufficiently homologous to the amino acid sequence shown in table II, columns 5 and 7 such that the protein or portion thereof maintains the ability to participate in the increase of tolerance and/or resistance to environmental stress and increase of biomass production as compared to a corresponding non-transformed wild type plant cell, plant or part thereof, in particular increasing the activity as mentioned above or as described in the examples in plants is comprised.

[0298] As used herein, the language “sufficiently homologous” refers to proteins or portions thereof which have amino acid sequences which include a minimum number of identical or equivalent amino acid residues (e.g., an amino acid residue which has a similar side chain as an amino acid residue in one of the sequences of the polypeptide of the present invention) to an amino acid sequence shown in table II, columns 5 and 7 such that the protein or portion thereof is able to participate in the increase of the increase of tolerance and/or resistance to environmental stress and increase of biomass production as compared to a corresponding non-transformed wild type plant cell, plant or part thereof. For examples having the activity of a protein as shown in table II, column 3 and as described herein.

[0299] In one embodiment, the nucleic acid molecule of the present invention comprises a nucleic acid that encodes a portion of the protein of the present invention. The protein is at least about 30%, 35%, 40%, 45% or 50%, preferably at least about 55%, 60%, 65% or 70%, and more preferably at least about 75%, 80%, 85%, 90%, 91%, 92%, 93% or 94% and most preferably at least about 95%, 97%, 98%, 99% or more homologous to an entire amino acid sequence of table II, columns 5 and 7 and having above-mentioned activity, e.g. conferring an increased yield, preferably under condition of transient and repetitive abiotic stress as compared to a corresponding non-transformed wild type plant cell, plant or part thereof by for example expression either in the cytsol or in an organelle such as a plastid or mitochondria or both, preferably in plastids.

[0300] Portions of proteins encoded by the nucleic acid molecule of the invention are preferably biologically active, preferably having above-mentioned annotated activity, e.g. conferring an increase in tolerance and/or resistance to environmental stress and increase in biomass production as compared to a corresponding non-transformed wild type plant cell, plant or part thereof after increase of activity.

[0301] As mentioned herein, the term “biologically active portion” is intended to include a portion, e.g., a domain/motif, that confers increase in tolerance and/or resistance to environmental stress and increase in biomass production as compared to a corresponding non-transformed wild type plant cell, plant or part thereof or has an immunological activity such that it is binds to an antibody binding specifically to the polypeptide of the present invention or a polypeptide used in the process of the present invention for increased yield, preferably under condition of transient and repetitive abiotic stress as compared to a corresponding non-transformed wild type plant cell, plant or part thereof.

[0302] The invention further relates to nucleic acid molecules that differ from one of the nucleotide sequences shown in table I A, columns 5 and 7 (and portions thereof) due to degeneracy of the genetic code and thus encode a polypeptide of the present invention, in particular a polypeptide having above mentioned activity, e.g. as that polypeptides depicted by the sequence shown in table II, columns 5 and 7 or the functional homologues. Advantageously, the nucleic acid molecule of the invention comprises, or in an other embodiment has, a nucleotide sequence encoding a protein comprising, or in an other embodiment having, an amino acid sequence shown in table II, columns 5 and 7 or the functional homologues. In a still further embodiment, the nucleic acid molecule of the invention encodes a full length protein which is substantially homologous to an amino acid sequence shown in table II, columns 5 and 7 or the functional homologues. However, in a preferred embodiment, the nucleic acid molecule of the present invention does not consist of the sequence shown in table I, preferably table IA, columns 5 and 7.

[0303] In addition, it will be appreciated by those skilled in the art that DNA sequence polymorphisms that lead to changes in the amino acid sequences may exist within a population. Such genetic polymorphism in the gene encoding the polypeptide of the invention or comprising the nucleic acid molecule of the invention may exist among individuals within a population due to natural variation.

[0304] As used herein, the terms “gene” and “recombinant gene” refer to nucleic acid molecules comprising an open reading frame encoding the polypeptide of the invention or comprising the nucleic acid molecule of the invention or encoding the polypeptide used in the process of the present invention, preferably from a crop plant or from a microorganism useful for the method of the invention. Such natural variations can typically result in 1-5% variance in the nucleotide sequence of the gene. Any and all such nucleotide variations and resulting amino acid polymorphisms in genes encoding a polypeptide of the invention or comprising a the nucleic acid molecule of the invention that are the result of natural variation and that do not alter the functional activity as described are intended to be within the scope of the invention.

[0305] Nucleic acid molecules corresponding to natural variants homologues of a nucleic acid molecule of the invention, which can also be a cDNA, can be isolated based on their homology to the nucleic acid molecules disclosed herein using the nucleic acid molecule of the invention, or a portion thereof, as a hybridization probe according to standard hybridization techniques under stringent hybridization conditions.

[0306] Accordingly, in another embodiment, a nucleic acid molecule of the invention is at least 15, 20, 25 or 30 nucleotides in length. Preferably, it hybridizes under stringent conditions to a nucleic acid molecule comprising a nucleotide sequence of the nucleic acid molecule of the present invention or used in the process of the present invention, e.g. comprising the sequence shown in table I, columns 5 and 7. The nucleic acid molecule is preferably at least 20, 30, 50, 100, 250 or more nucleotides in length.

[0307] The term “hybridizes under stringent conditions” is defined above. In one embodiment, the term “hybridizes under stringent conditions” is intended to describe conditions for hybridization and washing under which nucleotide sequences at least 30%, 40%, 50% or 65% identical to each other typically remain hybridized to each other. Preferably, the conditions are such that sequences at least about 70%, more preferably at least about 75% or 80%, and even more preferably at least about 85%, 90% or 95% or more identical to each other typically remain hybridized to each other.

[0308] Preferably, nucleic acid molecule of the invention that hybridizes under stringent conditions to a sequence shown in table I, columns 5 and 7 corresponds to a naturally-occurring nucleic acid molecule of the invention. As used herein, a “naturally-occurring” nucleic acid molecule refers to an RNA or DNA molecule having a nucleotide sequence that occurs in nature (e.g., encodes a natural protein). Preferably, the nucleic acid molecule encodes a natural protein having above-mentioned activity, e.g. conferring the tolerance and/or resistance to environmental stress and biomass production increase after increasing the expression or activity thereof or the activity of a protein of the invention or used in the process of the invention by for example expression the nucleic acid sequence of the gene product in the cytsol and/or in an organelle such as a plastid or mitochondria, preferably in plastids.

[0309] In addition to naturally-occurring variants of the sequences of the polypeptide or nucleic acid molecule of the invention as well as of the polypeptide or nucleic acid molecule used in the process of the invention that may exist in the population, the skilled artisan will further appreciate that changes can be introduced by mutation into a nucleotide sequence of the nucleic acid molecule encoding the polypeptide of the invention or used in the process of the present invention, thereby leading to changes in the amino acid sequence of the encoded said polypeptide, without altering the functional ability of the polypeptide, preferably not decreasing said activity.

[0310] For example, nucleotide substitutions leading to amino acid substitutions at “non-essential” amino acid residues can be made in a sequence of the nucleic acid molecule of the invention or used in the process of the invention, e.g. shown in table I, columns 5 and 7.

[0311] A “non-essential” amino acid residue is a residue that can be altered from the wild-type sequence of one without altering the activity of said polypeptide, whereas an “essential” amino acid residue is required for an activity as mentioned above, e.g. leading to an increase in the tolerance and/or resistance to environmental stress and biomass production as compared to a corresponding non-transformed wild type plant cell, plant or part thereof in an organism after an increase of activity of the polypeptide. Other amino acid residues, however, (e.g., those that are not conserved or only semi-conserved in the domain having said activity) may not be essential for activity and thus are likely to be amenable to alteration without altering said activity.

[0312] Further, a person skilled in the art knows that the codon usage between organisms can differ. Therefore, he may adapt the codon usage in the nucleic acid molecule of the present invention to the usage of the organism or the cell compartment for example of the plastid or mitochondria in which the polynucleotide or polypeptide is expressed.

[0313] Accordingly, the invention relates to nucleic acid molecules encoding a polypeptide having above-mentioned activity, in an organisms or parts thereof by for example expression either in the cytsol or in an organelle such as a plastid or mitochondria or both, preferably in plastids that contain changes in amino acid residues that are not essential for said activity. Such polypeptides differ in amino acid sequence from a sequence contained in the sequences shown in table II, columns 5 and 7 yet retain said activity described herein. The nucleic acid molecule can comprise a nucleotide sequence encoding a polypeptide, wherein the polypeptide comprises an amino acid sequence at least about 50% identical to an amino acid sequence shown in table II, columns 5 and 7 and is capable of participation in the increased yield, preferably under condition of transient and repetitive abiotic stress production as compared to a corresponding non-transformed wild type plant cell, plant or part thereof after increasing its activity, e.g. its expression by for example expression either in the cytsol or in an organelle such as a plastid or mitochondria or both, preferably in plastids. Preferably, the protein encoded by the nucleic acid molecule is at least about 60% identical to the sequence shown in table II, columns 5 and 7, more preferably at least about 70% identical to one of the sequences shown in table II, columns 5 and 7, even more preferably at least about 80%, 90%, 95% homologous to the sequence shown in table II, columns 5 and 7, and most preferably at least about 96%, 97%, 98%, or 99% identical to the sequence shown in table II, columns 5 and 7.

[0314] To determine the percentage homology (=identity, herein used interchangeably) of two amino acid sequences or of two nucleic acid molecules, the sequences are written one underneath the other for an optimal comparison (for example gaps may be inserted into the sequence of a protein or of a nucleic acid in order to generate an optimal alignment with the other protein or the other nucleic acid).

[0315] The amino acid residues or nucleic acid molecules at the corresponding amino acid positions or nucleotide positions are then compared. If a position in one sequence is occupied by the same amino acid residue or the same nucleic acid molecule as the corresponding position in the other sequence, the molecules are homologous at this position (i.e. amino acid or nucleic acid “homology” as used in the present context corresponds to amino acid or nucleic acid “identity”. The percentage homology between the two sequences is a function of the number of identical positions shared by the sequences (i.e. % homology=number of identical positions/total number of positions×100). The terms “homology” and “identity” are thus to be considered as synonyms.

[0316] For the determination of the percentage homology (=identity) of two or more amino acids or of two or more nucleotide sequences several computer software programs have been developed. The homology of two or more sequences can be calculated with for example the software fasta, which presently has been used in the version fasta 3 (W. R. Pearson and D. J. Lipman (1988), Improved Tools for Biological Sequence Comparison.PNAS 85:2444-2448; W. R. Pearson (1990) Rapid and Sensitive Sequence Comparison with FASTP and FASTA, Methods in Enzymology 183:63-98; W. R. Pearson and D. J. Lipman (1988) Improved Tools for Biological Sequence Comparison.PNAS 85:2444-2448; W. R. Pearson (1990); Rapid and Sensitive Sequence Comparison with FASTP and FASTAMethods in Enzymology 183:63-98). Another useful program for the calculation of homologies of different sequences is the standard blast program, which is included in the Biomax pedant software (Biomax, Munich, Federal Republic of Germany). This leads unfortunately sometimes to suboptimal results since blast does not always include complete sequences of the subject and the querry. Nevertheless as this program is very efficient it can be used for the comparison of a huge number of sequences. The following settings are typically used for such a comparisons of sequences:

-p Program Name [String]; -d Database [String]; default=nr; -i Query File [File In]; default=stdin; -e Expectation value (E) [Real]; default=10.0; -m alignment view options: 0=pairwise; 1=query-anchored showing identities; 2=query-anchored no identities; 3=flat query-anchored, show identities; 4=flat query-anchored, no identities; 5=query-anchored no identities and blunt ends; 6=flat query-anchored, no identities and blunt ends; 7=XML Blast output; 8=tabular; 9 tabular with comment lines [Integer]; default=0; -o BLAST report Output File [File Out] Optional; default=stdout; -F Filter query sequence (DUST with blastn, SEG with others) [String]; default=T; -G Cost to open a gap (zero invokes default behavior) [Integer]; default=0; -E Cost to extend a gap (zero invokes default behavior) [Integer]; default=0; -X X dropoff value for gapped alignment (in bits) (zero invokes default behavior); blastn 30, megablast 20, tblastx 0, all others 15 [Integer]; default=0; -I Show GI's in deflines [T/F]; default=F; q Penalty for a nucleotide mismatch (blastn only) [Integer]; default=−3; -r Reward for a nucleotide match (blastn only) [Integer]; default=1; -v Number of database sequences to show one-line descriptions for (V) [Integer]; default=500; -b Number of database sequence to show alignments for (B) [Integer]; default=250; -f Threshold for extending hits, default if zero; blastp 11, blastn 0, blastx 12, tblastn 13; tblastx 13, megablast 0 [Integer]; default=0; -g Perfom gapped alignment (not available with tblastx) [T/F]; default=T; -Q Query Genetic code to use [Integer]; default=1; -D DB Genetic code (for tblast[nx] only) [Integer]; default=1; -a Number of processors to use [Integer]; default=1; -O SeqAlign file [File Out] Optional; -J Believe the query defline [T/F]; default=F; -M Matrix [String]; default=BLOSUM62; -W Word size, default if zero (blastn 11, megablast 28, all others 3) [Integer]; default=0; -z Effective length of the database (use zero for the real size) [Real]; default=0; -K Number of best hits from a region to keep (off by default, if used a value of 100 is recommended) [Integer]; default=0; -P 0 for multiple hit, 1 for single hit [Integer]; default=0; -Y Effective length of the search space (use zero for the real size) [Real]; default=0; -S Query strands to search against database (for blast[nx], and tblastx); 3 is both, 1 is top, 2 is bottom [Integer]; default=3; -T Produce HTML output [T/F]; default=F; -I Restrict search of database to list of GI's [String] Optional; -U Use lower case filtering of FASTA sequence [T/F] Optional; default=F; -y X dropoff value for ungapped extensions in bits (0.0 invokes default behavior); blastn 20, megablast 10, all others 7 [Real]; default=0.0; -Z X dropoff value for final gapped alignment in bits (0.0 invokes default behavior); blastn/megablast 50, tblastx 0, all others 25 [Integer]; default=0; -R PSI-TBLASTN checkpoint file [File In] Optional; -n MegaBlast search [T/F]; default=F; -L Location on query sequence [String] Optional; -A Multiple Hits window size, default if zero (blastn/megablast 0, all others 40 [Integer]; default=0; -w Frame shift penalty (OOF algorithm for blastx) [Integer]; default=0; -t Length of the largest intron allowed in tblastn for linking HSPs (0 disables linking) [Integer]; default=0.

[0317] Results of high quality are reached by using the algorithm of Needleman and Wunsch or Smith and Waterman. Therefore programs based on said algorithms are preferred. Advantageously the comparisons of sequences can be done with the program PileUp (J. Mol. Evolution., 25, 351 (1987), Higgins et al., CABIOS 5, 151 (1989)) or preferably with the programs “Gap” and “Needle”, which are both based on the algorithms of Needleman and Wunsch (J. Mol. Biol. 48; 443 (1970)), and “BestFit”, which is based on the algorithm of Smith and Waterman (Adv. Appl. Math. 2; 482 (1981)). “Gap” and “BestFit” are part of the GCG software-package (Genetics Computer Group, 575 Science Drive, Madison, Wis., USA 53711 (1991); Altschul et al., (Nucleic Acids Res. 25, 3389 (1997)), “Needle” is part of the The European Molecular Biology Open Software Suite (EMBOSS) (Trends in Genetics 16 (6), 276 (2000)). Therefore preferably the calculations to determine the percentages of sequence homology are done with the programs “Gap” or “Needle” over the whole range of the sequences. The following standard adjustments for the comparison of nucleic acid sequences were used for “Needle”: matrix: EDNAFULL, Gap_penalty: 10.0, Extend_penalty: 0.5. The following standard adjustments for the comparison of nucleic acid sequences were used for “Gap”: gap weight: 50, length weight: 3, average match: 10.000, average mismatch: 0.000.

[0318] For example a sequence, which has 80% homology with sequence SEQ ID NO: 63 at the nucleic acid level is understood as meaning a sequence which, upon comparison with the sequence SEQ ID NO: 63 by the above program “Needle” with the above parameter set, has a 80% identity.

[0319] Homology between two polypeptides is understood as meaning the identity of the amino acid sequence over in each case the entire sequence length which is calculated by comparison with the aid of the above program “Needle” using Matrix: EBLOSUM62, Gap_penalty: 8.0, Extend_penalty: 2.0.

[0320] For example a sequence which has a 80% homology with sequence SEQ ID NO: 64 at the protein level is understood as meaning a sequence which, upon comparison with the sequence SEQ ID NO: 64 by the above program “Needle” with the above parameter set, has a 80% identity.

[0321] Functional equivalents derived from one of the polypeptides as shown in table II, columns 5 and 7 according to the invention by substitution, insertion or deletion have at least 30%, 35%, 40%, 45% or 50%, preferably at least 55%, 60%, 65% or 70% by preference at least 80%, especially preferably at least 85% or 90%, 91%, 92%, 93% or 94%, very especially preferably at least 95%, 97%, 98% or 99% homology with one of the polypeptides as shown in table II, columns 5 and 7 according to the invention and are distinguished by essentially the same properties as the polypeptide as shown in table II, columns 5 and 7.

[0322] Functional equivalents derived from the nucleic acid sequence as shown in table I, columns 5 and 7 according to the invention by substitution, insertion or deletion have at least 30%, 35%, 40%, 45% or 50%, preferably at least 55%, 60%, 65% or 70% by preference at least 80%, especially preferably at least 85% or 90%, 91%, 92%, 93% or 94%, very especially preferably at least 95%, 97%, 98% or 99% homology with one of the polypeptides as shown in table II, columns 5 and 7 according to the invention and encode polypeptides having essentially the same properties as the polypeptide as shown in table II, columns 5 and 7.

[0323] “Essentially the same properties” of a functional equivalent is above all understood as meaning that the functional equivalent has above mentioned activity, by for example expression either in the cytsol or in an organelle such as a plastid or mitochondria or both, preferably in plastids while increasing the amount of protein, activity or function of said functional equivalent in an organism, e.g. a microorganism, a plant or plant or animal tissue, plant or animal cells or a part of the same.

[0324] A nucleic acid molecule encoding an homologous to a protein sequence of table II, columns 5 and 7 can be created by introducing one or more nucleotide substitutions, additions or deletions into a nucleotide sequence of the nucleic acid molecule of the present invention, in particular of table I, columns 5 and 7 such that one or more amino acid substitutions, additions or deletions are introduced into the encoded protein. Mutations can be introduced into the encoding sequences of table I, columns 5 and 7 by standard techniques, such as site-directed mutagenesis and PCR-mediated mutagenesis.

[0325] Preferably, conservative amino acid substitutions are made at one or more predicted non-essential amino acid residues. A “conservative amino acid substitution” is one in which the amino acid residue is replaced with an amino acid residue having a similar side chain. Families of amino acid residues having similar side chains have been defined in the art. These families include amino acids with basic side chains (e.g., lysine, arginine, histidine), acidic side chains (e.g., aspartic acid, glutamic acid), uncharged polar side chains (e.g., glycine, asparagine, glutamine, serine, threonine, tyrosine, cysteine), nonpolar side chains (e.g., alanine, valine, leucine, isoleucine, proline, phenylalanine, methionine, tryptophane), beta-branched side chains (e.g., threonine, valine, isoleucine) and aromatic side chains (e.g., tyrosine, phenylalanine, tryptophane, histidine).

[0326] Thus, a predicted nonessential amino acid residue in a polypeptide of the invention or a polypeptide used in the process of the invention is preferably replaced with another amino acid residue from the same family. Alternatively, in another embodiment, mutations can be introduced randomly along all or part of a coding sequence of a nucleic acid molecule of the invention or used in the process of the invention, such as by saturation mutagenesis, and the resultant mutants can be screened for activity described herein to identify mutants that retain or even have increased above mentioned activity, e.g. conferring an increased yield, preferably under condition of transient and repetitive abiotic stress as compared to a corresponding non-transformed wild type plant cell, plant or part thereof.

[0327] Following mutagenesis of one of the sequences of shown herein, the encoded protein can be expressed recombinantly and the activity of the protein can be determined using, for example, assays described herein (see Examples).

[0328] The highest homology of the nucleic acid molecule used in the process according to the invention was found for the following database entries by Gap search.

[0329] Homologues of the nucleic acid sequences used, with the sequence shown in table I, columns 5 and 7, comprise also allelic variants with at least approximately 30%, 35%, 40% or 45% homology, by preference at least approximately 50%, 60% or 70%, more preferably at least approximately 90%, 91%, 92%, 93%, 94% or 95% and even more preferably at least approximately 96%, 97%, 98%, 99% or more homology with one of the nucleotide sequences shown or the abovementioned derived nucleic acid sequences or their homologues, derivatives or analogues or parts of these. Allelic variants encompass in particular functional variants which can be obtained by deletion, insertion or substitution of nucleotides from the sequences shown, preferably from table I, columns 5 and 7, or from the derived nucleic acid sequences, the intention being, however, that the enzyme activity or the biological activity of the resulting proteins synthesized is advantageously retained or increased.

[0330] In one embodiment of the present invention, the nucleic acid molecule of the invention or used in the process of the invention comprises the sequences shown in any of the table I, columns 5 and 7. It is preferred that the nucleic acid molecule comprises as little as possible other nucleotides not shown in any one of table I, columns 5 and 7. In one embodiment, the nucleic acid molecule comprises less than 500, 400, 300, 200, 100, 90, 80, 70, 60, 50 or 40 further nucleotides. In a further embodiment, the nucleic acid molecule comprises less than 30, 20 or 10 further nucleotides. In one embodiment, the nucleic acid molecule use in the process of the invention is identical to the sequences shown in table I, columns 5 and 7.

[0331] Also preferred is that the nucleic acid molecule used in the process of the invention encodes a polypeptide comprising the sequence shown in table II, columns 5 and 7. In one embodiment, the nucleic acid molecule encodes less than 150, 130, 100, 80, 60, 50, 40 or 30 further amino acids. In a further embodiment, the encoded polypeptide comprises less than 20, 15, 10, 9, 8, 7, 6 or 5 further amino acids. In one embodiment used in the inventive process, the encoded polypeptide is identical to the sequences shown in table II, columns 5 and 7.

[0332] In one embodiment, the nucleic acid molecule of the invention or used in the process encodes a polypeptide comprising the sequence shown in table II, columns 5 and 7 comprises less than 100 further nucleotides. In a further embodiment, said nucleic acid molecule comprises less than 30 further nucleotides. In one embodiment, the nucleic acid molecule used in the process is identical to a coding sequence of the sequences shown in table I, columns 5 and 7.

[0333] Polypeptides (=proteins), which still have the essential biological or enzymatic activity of the polypeptide of the present invention conferring an increased yield, preferably under condition of transient and repetitive abiotic stress production as compared to a corresponding non-transformed wild type plant cell, plant or part thereof i.e. whose activity is essentially not reduced, are polypeptides with at least 10% or 20%, by preference 30% or 40%, especially preferably 50% or 60%, very especially preferably 80% or 90 or more of the wild type biological activity or enzyme activity, advantageously, the activity is essentially not reduced in comparison with the activity of a polypeptide shown in table II, columns 5 and 7 expressed under identical conditions.

[0334] Homologues of table I, columns 5 and 7 or of the derived sequences of table II, columns 5 and 7 also mean truncated sequences, cDNA, single-stranded DNA or RNA of the coding and noncoding DNA sequence. Homologues of said sequences are also understood as meaning derivatives, which comprise noncoding regions such as, for example, UTRs, terminators, enhancers or promoter variants. The promoters upstream of the nucleotide sequences stated can be modified by one or more nucleotide substitution(s), insertion(s) and/or deletion(s) without, however, interfering with the functionality or activity either of the promoters, the open reading frame (=ORF) or with the 3′-regulatory region such as terminators or other 3′ regulatory regions, which are far away from the ORF. It is furthermore possible that the activity of the promoters is increased by modification of their sequence, or that they are replaced completely by more active promoters, even promoters from heterologous organisms. Appropriate promoters are known to the person skilled in the art and are mentioned herein below.

[0335] In addition to the nucleic acid molecules encoding the YSRPs described above, another aspect of the invention pertains to negative regulators of the activity of a nucleic acid molecules selected from the group according to table I, column 5 and/or 7, preferably column 7. Antisense polynucleotides thereto are thought to inhibit the downregulating activity of those negative regulators by specifically binding the target polynucleotide and interfering with transcription, splicing, transport, translation, and/or stability of the target polynucleotide. Methods are described in the prior art for targeting the antisense polynucleotide to the chromosomal DNA, to a primary RNA transcript, or to a processed mRNA. Preferably, the target regions include splice sites, translation initiation codons, translation termination codons, and other sequences within the open reading frame.

[0336] The term “antisense,” for the purposes of the invention, refers to a nucleic acid comprising a polynucleotide that is sufficiently complementary to all or a portion of a gene, primary transcript, or processed mRNA, so as to interfere with expression of the endogenous gene. “Complementary” polynucleotides are those that are capable of base pairing according to the standard Watson-Crick complementarity rules. Specifically, purines will base pair with pyrimidines to form a combination of guanine paired with cytosine (G:C) and adenine paired with either thymine (A:T) in the case of DNA, or adenine paired with uracil (A:U) in the case of RNA. It is understood that two polynucleotides may hybridize to each other even if they are not completely complementary to each other, provided that each has at least one region that is substantially complementary to the other. The term “antisense nucleic acid” includes single stranded RNA as well as double-stranded DNA expression cassettes that can be transcribed to produce an antisense RNA. “Active” antisense nucleic acids are antisense RNA molecules that are capable of selectively hybridizing with a negative regulator of the activity of a nucleic acid molecules encoding a polypeptide having at least 80% sequence identity with the polypeptide selected from the group according to table II, column 5 and/or 7, preferably column 7.

The antisense nucleic acid can be complementary to an entire negative regulator strand, or to only a portion thereof. In an embodiment, the antisense nucleic acid molecule is antisense to a “noncoding region” of the coding strand of a nucleotide sequence encoding a YSRP. The term “noncoding region” refers to 5′ and 3′ sequences that flank the coding region that are not translated into amino acids (i.e., also referred to as 5′ and 3′ untranslated regions). The antisense nucleic acid molecule can be complementary to only a portion of the noncoding region of YSRP mRNA. For example, the antisense oligonucleotide can be complementary to the region surrounding the translation start site of YSRP mRNA. An antisense oligonucleotide can be, for example, about 5, 10, 15, 20, 25, 30, 35, 40, 45 or 50 nucleotides in length. Typically, the antisense molecules of the present invention comprise an RNA having 60-100% sequence identity with at least 14 consecutive nucleotides of a noncoding region of one of the nucleic acid of table I. Preferably, the sequence identity will be at least 70%, more preferably at least 75%, 80%, 85%, 90%, 95%, 98% and most preferably 99%.
An antisense nucleic acid of the invention can be constructed using chemical synthesis and enzymatic ligation reactions using procedures known in the art. For example, an antisense nucleic acid (e.g., an antisense oligonucleotide) can be chemically synthesized using naturally occurring nucleotides or variously modified nucleotides designed to increase the biological stability of the molecules or to increase the physical stability of the duplex formed between the antisense and sense nucleic acids, e.g., phosphorothioate derivatives and acridine substituted nucleotides can be used. Examples of modified nucleotides which can be used to generate the antisense nucleic acid include 5-fluorouracil, 5-bromouracil, 5-chlorouracil, 5-iodouracil, hypoxanthine, xanthine, 4-acetylcytosine, 5-(carboxyhydroxylmethyl) uracil, 5-carboxymethylaminomethyl-2-thiouridine, 5-carboxymethylaminomethyluracil, dihydrouracil, beta-D-galactosylqueosine, inosine, N6-isopentenyladenine, 1-methylguanine, 1-methylinosine, 2,2-dimethylguanine, 2-methyladenine, 2-methylguanine, 3-methylcytosine, 5-methylcytosine, N6-adenine, 7-methylguanine, 5-methylaminomethyluracil, 5-methoxyaminomethyl-2-thiouracil, beta-D-mannosylqueosine, 5′-methoxycarboxymethyluracil, 5-methoxyuracil, 2-methylthio-N-6-isopentenyladenine, uracil-5-oxyacetic acid (v), wybutoxosine, pseudouracil, queosine, 2-thiocytosine, 5-methyl-2-thiouracil, 2-thiouracil, 4-thiouracil, 5-methyluracil, uracil-5-oxyacetic acid methylester, uracil-5-oxyacetic acid (v), 5-methyl-2-thiouracil, 3-(3-amino-3-N-2-carboxypropyl) uracil, (acp3)_{w}, and 2,6-diaminopurine. Alternatively, the antisense nucleic acid can be produced biologically using an expression vector into which a nucleic acid has been subcloned in an antisense orientation (i.e., RNA transcribed from the inserted nucleic acid will be of an antisense orientation to a target nucleic acid of interest, described further in the following subsection).

[0337] In yet another embodiment, the antisense nucleic acid molecule of the invention is an alpha-anomeric nucleic acid molecule. An alpha-anomeric nucleic acid molecule forms specific double-stranded hybrids with complementary RNA in which, contrary to the usual b-units, the strands run parallel to each other (Gaultier et al., 1987, Nucleic Acids. Res. 15:6625-6641). The antisense nucleic acid molecule can also comprise a 2′-o-methylribonucleotide (Inoue et al., 1987, Nucleic Acids Res. 15:6131-6148) or a chimeric RNA-DNA analogue (Inoue et al., 1987, FEBS Lett. 215:327-330).

[0338] The antisense nucleic acid molecules of the invention are typically administered to a cell or generated in situ such that they hybridize with or bind to cellular mRNA and/or genomic DNA. The hybridization can be by conventional nucleotide complementarity to form a stable duplex, or, for example, in the case of an antisense nucleic acid molecule which binds to DNA duplexes, through specific interactions in the major groove of the double helix. The antisense molecule can be modified such that it specifically binds to a receptor or an antigen expressed on a selected cell surface, e.g., by linking the antisense nucleic acid molecule to a peptide or an antibody which binds to a cell surface receptor or antigen. The antisense nucleic acid molecule can also be delivered to cells using the vectors described herein. To achieve sufficient intracellular concentrations of the antisense molecules, vector constructs in which the antisense nucleic acid molecule is placed under the control of a strong prokaryotic, viral, or eukaryotic (including plant) promoter are preferred.

[0339] As an alternative to antisense polynucleotides, ribozymes, sense polynucleotides, or double stranded RNA (dsRNA) can be used to reduce expression of a YSRP polypeptide. By “ribozyme” is meant a catalytic RNA-based enzyme with ribonuclease activity which is capable of cleaving a single-stranded nucleic acid, such as an mRNA, to which it has a complementary region. Ribozymes (e.g., hammerhead ribozymes described in Haselhoff and Gerlach, 1988, Nature 334:585-591) can be used to catalytically cleave YSRP mRNA transcripts to thereby inhibit translation of YSRP mRNA. A ribozyme having specificity for a YSRP-encoding nucleic acid can be designed based upon the nucleotide sequence of a YSRP cDNA, as disclosed herein or on the basis of a heterologous sequence to be isolated according to methods taught in this invention. For example, a derivative of a Tetrahymena L-19 IVS RNA can be constructed in which the nucleotide sequence of the active site is complementary to the nucleotide sequence to be cleaved in a YSRP-encoding mRNA. See, e.g., U.S. Pat. Nos. 4,987,071 and 5,116,742 to Cech et al. Alternatively, YSRP mRNA can be used to select a catalytic RNA having a specific ribonuclease activity from a pool of RNA molecules. See, e.g., Bartel, D. and Szostak, J. W., 1993, Science 261:1411-1418. In preferred embodiments, the ribozyme will contain a portion having at least 7, 8, 9, 10, 12, 14, 16, 18 or 20 nucleotides, and more preferably 7 or 8 nucleotides, that have 100% complementarity to a portion of the target RNA. Methods for making ribozymes are known to those skilled in the art. See, e.g., U.S. Pat. Nos. 6,025,167; 5,773,260; and 5,496,698.

The term “dsRNA,” as used herein, refers to RNA hybrids comprising two strands of RNA. The dsRNAs can be linear or circular in structure. In a preferred embodiment, dsRNA is specific for a polynucleotide encoding either the polypeptide according to table II or a polypeptide having at least 70% sequence identity with a polypeptide according to table II. The hybridizing RNAs may be substantially or completely complementary. By “substantially complementary,” is meant that when the two hybridizing RNAs are optimally aligned using the BLAST program as described above, the hybridizing portions are at least 95% complementary. Preferably, the dsRNA will be at least 100 base pairs in length. Typically, the hybridizing RNAs will be of identical length with no over hanging 5′ or 3′ ends and no gaps. However, dsRNAs having 5′ or 3′ overhangs of up to 100 nucleotides may be used in the methods of the invention.
The dsRNA may comprise ribonucleotides or ribonucleotide analogs, such as 2′-O-methyl ribosyl residues, or combinations thereof. See, e.g., U.S. Pat. Nos. 4,130,641 and 4,024,222. A dsRNA polyriboinosinic acid:polyribocytidylic acid is described in U.S. Pat. No. 4,283,393. Methods for making and using dsRNA are known in the art. One method comprises the simultaneous transcription of two complementary DNA strands, either in vivo, or in a single in vitro reaction mixture. See, e.g., U.S. Pat. No. 5,795,715. In one embodiment, dsRNA can be introduced into a plant or plant cell directly by standard transformation procedures. Alternatively, dsRNA can be expressed in a plant cell by transcribing two complementary RNAs.

[0340] Other methods for the inhibition of endogenous gene expression, such as triple helix formation (Moser et al., 1987, Science 238:645-650 and Cooney et al., 1988, Science 241:456-459) and cosuppression (Napoli et al., 1990, The Plant Cell 2:279-289) are known in the art. Partial and full-length cDNAs have been used for the cosuppression of endogenous plant genes. See, e.g., U.S. Pat. Nos. 4,801,340, 5,034,323, 5,231,020, and 5,283,184; Van der Kroll et al., 1990, The Plant Cell 2:291-299; Smith et al., 1990, Mol. Gen. Genetics 224:477-481 and Napoli et al., 1990, The Plant Cell 2:279-289.

For sense suppression, it is believed that introduction of a sense polynucleotide blocks transcription of the corresponding target gene. The sense polynucleotide will have at least 65% sequence identity with the target plant gene or RNA. Preferably, the percent identity is at least 80%, 90%, 95% or more. The introduced sense polynucleotide need not be full length relative to the target gene or transcript. Preferably, the sense polynucleotide will have at least 65% sequence identity with at least 100 consecutive nucleotides of one of the nucleic acids as depicted in Table I. The regions of identity can comprise introns and/or exons and untranslated regions. The introduced sense polynucleotide may be present in the plant cell transiently, or may be stably integrated into a plant chromosome or extrachromosomal replicon.

[0341] Further, object of the invention is an expression vector comprising a nucleic acid molecule comprising a nucleic acid molecule selected from the group consisting of:
[0342] a) a nucleic acid molecule encoding the polypeptide shown in column 5 or 7 of Table II;
[0343] b) a nucleic acid molecule shown in column 5 or 7 of Table I;
[0344] c) a nucleic acid molecule, which, as a result of the degeneracy of the genetic code, can be derived from a polypeptide sequence depicted in column 5 or 7 of Table II and confers an increased yield, e.g. an increased yield-related trait, for example enhanced tolerance to abiotic environmental stress, for example an increased drought tolerance and/or low temperature tolerance and/or an increased nutrient use efficiency, intrinsic yield and/or another mentioned yield-related trait, preferably under condition of transient and repetitive abiotic stress as compared to a corresponding non-transformed wild type plant cell, a plant or a part thereof;
[0345] d) a nucleic acid molecule having at least 30% identity with the nucleic acid molecule sequence of a polynucleotide comprising the nucleic acid molecule shown in column 5 or 7 of Table I and confers an increased yield, e.g. an increased yield-related trait, for example enhanced tolerance to abiotic environmental stress, for example an increased drought tolerance and/or low temperature tolerance and/or an increased nutrient use efficiency, intrinsic yield and/or another mentioned yield-related trait, preferably under condition of transient and repetitive abiotic stress as compared to a corresponding non-transformed wild type plant cell, a plant or a part thereof;
[0346] e) a nucleic acid molecule encoding a polypeptide having at least 30% identity with the amino acid sequence of the polypeptide encoded by the nucleic acid molecule of (a) to (c) and having the activity represented by a nucleic acid molecule comprising a polynucleotide as depicted in column 5 of Table I and confers an increased yield, e.g. an increased yield-related trait, for example enhanced tolerance to abiotic environmental stress, for example an increased drought tolerance and/or low temperature tolerance and/or an increased nutrient use efficiency, intrinsic yield and/or another mentioned yield-related trait, preferably under condition of transient and repetitive abiotic stress as compared to a corresponding non-transformed wild type plant cell, a plant or a part thereof;
[0347] f) nucleic acid molecule which hybridizes with a nucleic acid molecule of (a) to (c) under stringent hybridization conditions and confers an increased yield, e.g. an increased yield-related trait, for example enhanced tolerance to abiotic environmental stress, for example an increased drought tolerance and/or low temperature tolerance and/or an increased nutrient use efficiency, intrinsic yield and/or another mentioned yield-related trait, preferably under condition of transient and repetitive abiotic stress as compared to a corresponding non-transformed wild type plant cell, a plant or a part thereof;
[0348] g) a nucleic acid molecule encoding a polypeptide which can be isolated with the aid of monoclonal or polyclonal antibodies made against a polypeptide encoded by one of the nucleic acid molecules of (a) to (e) and having the activity represented by the nucleic acid molecule comprising a polynucleotide as depicted in column 5 of Table I;
[0349] h) a nucleic acid molecule encoding a polypeptide comprising the consensus sequence or one or more polypeptide motifs as shown in column 7 of Table IV and preferably having the activity represented by a nucleic acid molecule comprising a polynucleotide as depicted in column 5 of Table II or IV;
[0350] i) a nucleic acid molecule encoding a polypeptide having the activity represented by a protein as depicted in column 5 of Table II and confers an increased yield, e.g. an increased yield-related trait, for example enhanced tolerance to abiotic environmental stress, for example an increased drought tolerance and/or low temperature tolerance and/or an increased nutrient use efficiency, intrinsic yield and/or another mentioned yield-related trait, preferably under condition of transient and repetitive abiotic stress as compared to a corresponding non-transformed wild type plant cell, a plant or a part thereof;
[0351] j) nucleic acid molecule which comprises a polynucleotide, which is obtained by amplifying a cDNA library or a genomic library using the primers in column 7 of Table III which do not start at their 5′-end with the nucleotides ATA and preferably having the activity represented by a nucleic acid molecule comprising a polynucleotide as depicted in column 5 of Table II or IV;
[0352] and
[0353] k) a nucleic acid molecule which is obtainable by screening a suitable nucleic acid library under stringent hybridization conditions with a probe comprising a complementary sequence of a nucleic acid molecule of (a) or (b) or with a fragment thereof, having at least 15 nt, preferably 20 nt, 30 nt, 50 nt, 100 nt, 200 nt or 500 nt of a nucleic acid molecule complementary to a nucleic acid molecule sequence characterized in (a) to (e) and encoding a polypeptide having the activity represented by a protein comprising a polypeptide as depicted in column 5 of Table II,
   whereby the nucleic acid molecule according to (a) to (j) is at least in one or more nucleotides different from the sequence depicted in column 5 or 7 of Table I A and preferably which encodes a protein which differs at least in one or more amino acids from the protein sequences depicted in column 5 or 7 of Table II A.

[0354] The invention further provides an isolated recombinant expression vector comprising a stress related protein encoding nucleic acid as described above, wherein expression of the vector or stress related protein encoding nucleic acid, respectively in a host cell results in increased tolerance and/or resistance to environmental stress as compared to the corresponding non-transformed wild type of the host cell. As used herein, the term “vector” refers to a nucleic acid molecule capable of transporting another nucleic acid to which it has been linked. One type of vector is a “plasmid”, which refers to a circular double stranded DNA loop into which additional DNA segments can be ligated. Another type of vector is a viral vector, wherein additional DNA segments can be ligated into the viral genome. Further types of vectors can be linearized nucleic acid sequences, such as transposons, which are pieces of DNA which can copy and insert themselves. There have been 2 types of transposons found: simple transposons, known as Insertion Sequences and composite transposons, which can have several genes as well as the genes that are required for transposition.

Certain vectors are capable of autonomous replication in a host cell into which they are introduced (e.g., bacterial vectors having a bacterial origin of replication and episomal mammalian vectors). Other vectors (e.g., non-episomal mammalian vectors) are integrated into the genome of a host cell upon introduction into the host cell, and thereby are replicated along with the host genome. Moreover, certain vectors are capable of directing the expression of genes to which they are operatively linked. Such vectors are referred to herein as “expression vectors”. In general, expression vectors of utility in recombinant DNA techniques are often in the form of plasmids. In the present specification, “plasmid” and “vector” can be used interchangeably as the plasmid is the most commonly used form of vector. However, the invention is intended to include such other forms of expression vectors, such as viral vectors (e.g., replication defective retroviruses, adenoviruses and adeno-associated viruses), which serve equivalent functions.

[0355] A plant expression cassette preferably contains regulatory sequences capable of driving gene expression in plant cells and operably linked so that each sequence can fulfill its function, for example, termination of transcription by polyadenylation signals. Preferred polyadenylation signals are those originating from Agrobacterium tumefaciens T-DNA such as the gene 3 known as octopine synthase of the Ti-plasmid pTiACH5 (Gielen et al., 1984 EMBO J. 3:835) or functional equivalents thereof but also all other terminators functionally active in plants are suitable.

As plant gene expression is very often not limited on transcriptional levels, a plant expression cassette preferably contains other operably linked sequences like translational enhancers such as the overdrive-sequence containing the 5″-untranslated leader sequence from tobacco mosaic virus enhancing the protein per RNA ratio (Gallie et al., 1987 Nucl. Acids Research 15:8693-8711).

[0356] Plant gene expression has to be operably linked to an appropriate promoter conferring gene expression in a timely, cell or tissue specific manner. Preferred are promoters driving constitutive expression (Benfey et al., 1989 EMBO J. 8:2195-2202) like those derived from plant viruses like the 35S CaMV (Franck et al., 1980 Cell 21:285-294), the 19S CaMV (see also U.S. Pat. No. 5,352,605 and PCT Application No. WO 8402913) or plant promoters like those from Rubisco small subunit described in U.S. Pat. No. 4,962,028.

[0357] Additional advantageous regulatory sequences are, for example, included in the plant promoters such as CaMV/35S [Franck et al., Cell 21 (1980) 285-294], PRP1 [Ward et al., Plant. Mol. Biol. 22 (1993)], SSU, OCS, lib4, usp, STLS1, B33, LEB4, nos or in the ubiquitin, napin or phaseolin promoter. Also advantageous in this connection are inducible promoters such as the promoters described in EP-A-0 388 186 (benzyl sulfonamide inducible), Plant J. 2, 1992: 397-404 (Gatz et al., Tetracyclin inducible), EP-A-0 335 528 (abscisic acid inducible) or WO 93/21334 (ethanol or cyclohexenol inducible). Additional useful plant promoters are the cytosolic FBPase promotor or ST-LSI promoter of the potato (Stockhaus et al., EMBO J. 8, 1989, 2445), the phosphorybosyl phyrophoshate amido transferase promoter of Glycine max (gene bank accession No. U87999) or the noden specific promoter described in EP-A-0 249 676. Additional particularly advantageous promoters are seed specific promoters which can be used for monokotyledones or dikotyledones and are described in U.S. Pat. No. 5,608,152 (napin promoter from rapeseed), WO 98/45461 (phaseolin promoter from Arabidopsis), U.S. Pat. No. 5,504,200 (phaseolin promoter from Phaseolus vulgaris), WO 91/13980 (Bce4 promoter from Brassica) and Baeumlein et al., Plant J., 2, 2, 1992: 233-239 (LEB4 promoter from leguminosa). Said promoters are useful in dikotyledones. The following promoters are useful for example in monokotyledones Ipt-2- or Ipt-1-promoter from barley (WO 95/15389 and WO 95/23230) or hordein promoter from barley. Other useful promoters are described in WO 99/16890.

It is possible in principle to use all natural promoters with their regulatory sequences like those mentioned above for the novel process. It is also possible and advantageous in addition to use synthetic promoters.

[0358] The gene construct may also comprise further genes which are to be inserted into the organisms and which are for example involved in stress resistance and biomass production increase. It is possible and advantageous to insert and express in host organisms regulatory genes such as genes for inducers, repressors or enzymes which intervene by their enzymatic activity in the regulation, or one or more or all genes of a biosynthetic pathway. These genes can be heterologous or homologous in origin. The inserted genes may have their own promoter or else be under the control of same promoter as the sequences of the nucleic acid of table I or their homologs.

The gene construct advantageously comprises, for expression of the other genes present, additionally 3′ and/or 5′ terminal regulatory sequences to enhance expression, which are selected for optimal expression depending on the selected host organism and gene or genes.

[0359] These regulatory sequences are intended to make specific expression of the genes and protein expression possible as mentioned above. This may mean, depending on the host organism, for example that the gene is expressed or overexpressed only after induction, or that it is immediately expressed and/or overexpressed.

The regulatory sequences or factors may moreover preferably have a beneficial effect on expression of the introduced genes, and thus increase it. It is possible in this way for the regulatory elements to be enhanced advantageously at the transcription level by using strong transcription signals such as promoters and/or enhancers. However, in addition, it is also possible to enhance translation by, for example, improving the stability of the mRNA.

[0360] Other preferred sequences for use in plant gene expression cassettes are targeting-sequences necessary to direct the gene product in its appropriate cell compartment (for review see Kermode, 1996 Crit. Rev. Plant Sci. 15(4):285-423 and references cited therein) such as the vacuole, the nucleus, all types of plastids like amyloplasts, chloroplasts, chromoplasts, the extracellular space, mitochondria, the endoplasmic reticulum, oil bodies, peroxisomes and other compartments of plant cells.

Plant gene expression can also be facilitated via an inducible promoter (for review see Gatz, 1997 Annu. Rev. Plant Physiol. Plant Mol. Biol. 48:89-108). Chemically inducible promoters are especially suitable if gene expression is wanted to occur in a time specific manner.

[0361] Table VI lists several examples of promoters that may be used to regulate transcription of the stress related protein nucleic acid coding sequences.

TABLE VI
Examples of tissue-specific and stress-inducible promoters in plants

| Expression | Reference |
|---|---|
| Cor78- Cold, drought, salt, | Ishitani, et al., Plant Cell 9: 1935-1949 (1997). |
| ABA, wounding-inducible | Yamaguchi-Shinozaki and Shinozaki, Plant Cell |
| | 6: 251-264 (1994). |
| Rci2A - Cold, dehydration- | Capel et al., Plant Physiol 115: 569-576 (1997) |
| inducible | |
| Rd22 - Drought, salt | Yamaguchi-Shinozaki and Shinozaki, Mol Gen |
| | Genet 238: 17-25 (1993). |
| Cor15A- Cold, dehydration, | Baker et al., Plant Mol. Biol. 24: 701-713 (1994). |
| ABA | |
| GH3- Auxin inducible | Liu et al., Plant Cell 6: 645-657 (1994) |
| ARSK1-Root, salt inducible | Hwang and Goodman, Plant J 8: 37-43 (1995). |
| PtxA - Root, salt inducible | GenBank accession X67427 |
| SbHRGP3 - Root specific | Ahn et al., Plant Cell 8: 1477-1490 (1998). |
| KST1 - Guard cell specific | Plesch et al., Plant Journal. 28(4): 455-64, (2001) |
| KAT1 - Guard cell specific | Plesch et al., Gene 249: 83-89 (2000) |
| | Nakamura et al., Plant Physiol. 109: 371-374 (1995) |
| salicylic acid inducible | PCT Application No. WO 95/19443 |
| tetracycline inducible | Gatz et al. Plant J. 2: 397-404 (1992) |
| Ethanol inducible | PCT Application No. WO 93/21334 |
| pathogen inducible PRP1 | Ward et al., 1993 Plant. Mol. Biol. 22: 361-366 |
| heat inducible hsp80 | U.S. Pat. No. 5,187,267 |
| cold inducible alpha-amylase | PCT Application No. WO 96/12814 |
| Wound-inducible pinII | European Patent No. 375091 |
| RD29A - salt-inducible | Yamaguchi-Shinozalei et al. (1993) Mol. Gen. |
| | Genet. 236: 331-340 |
| plastid-specific viral RNA- | PCT Application No. WO 95/16783 and. WO |
| polymerase | 97/06250 |

[0362] Other promotors, e.g. superpromotor (Ni et al., Plant Journal 7, 1995: 661-676), Ubiquitin promotor (Callis et al., J. Biol. Chem., 1990, 265: 12486-12493; U.S. Pat. No. 5,510,474; U.S. Pat. No. 6,020,190; Kawalleck et al., Plant. Molecular Biology, 1993, 21: 673-684) or 34S promotor (GenBank Accession numbers M59930 and X16673) were similar useful for the present invention and are known to a person skilled in the art.

Developmental stage-preferred promoters are preferentially expressed at certain stages of development. Tissue and organ preferred promoters include those that are preferentially expressed in certain tissues or organs, such as leaves, roots, seeds, or xylem. Examples of tissue preferred and organ preferred promoters include, but are not limited to fruit-preferred, ovule-preferred, male tissue-preferred, seed-preferred, integument-preferred, tuber-preferred, stalk-preferred, pericarp-preferred, and leaf-preferred, stigma-preferred, pollen-preferred, anther-preferred, a petal-preferred, sepal-preferred, pedicel-preferred, silique-preferred, stem-preferred, root-preferred promoters, and the like. Seed preferred promoters are preferentially expressed during seed development and/or germination. For example, seed preferred promoters can be embryo-preferred, endosperm preferred, and seed coat-preferred. See Thompson et al., 1989, BioEssays 10:108. Examples of seed preferred promoters include, but are not limited to, cellulose synthase (celA), Cim1, gamma-zein, globulin-1, maize 19 kD zein (cZ19B1), and the like.
Other promoters useful in the expression cassettes of the invention include, but are not limited to, the major chlorophyll a/b binding protein promoter, histone promoters, the Ap3 promoter, the β-conglycin promoter, the napin promoter, the soybean lectin promoter, the maize 15 kD zein promoter, the 22 kD zein promoter, the 27 kD zein promoter, the g-zein promoter, the waxy, shrunken 1, shrunken 2 and bronze promoters, the Zm13 promoter (U.S. Pat. No. 5,086,169), the maize polygalacturonase promoters (PG) (U.S. Pat. Nos. 5,412,085 and 5,545,546), and the SGB6 promoter (U.S. Pat. No. 5,470,359), as well as synthetic or other natural promoters.

[0363] Additional flexibility in controlling heterologous gene expression in plants may be obtained by using DNA binding domains and response elements from heterologous sources (i.e., DNA binding domains from non-plant sources). An example of such a heterologous DNA binding domain is the LexA DNA binding domain (Brent and Ptashne, 1985, Cell 43:729-736).

[0364] The invention further provides a recombinant expression vector comprising a YSRP DNA molecule of the invention cloned into the expression vector in an antisense orientation. That is, the DNA molecule is operatively linked to a regulatory sequence in a manner that allows for expression (by transcription of the DNA molecule) of an RNA molecule that is antisense to a YSRP mRNA. Regulatory sequences operatively linked to a nucleic acid molecule cloned in the antisense orientation can be chosen which direct the continuous expression of the antisense RNA molecule in a variety of cell types. For instance, viral promoters and/or enhancers, or regulatory sequences can be chosen which direct constitutive, tissue specific, or cell type specific expression of antisense RNA. The antisense expression vector can be in the form of a recombinant plasmid, phagemid, or attenuated virus wherein antisense nucleic acids are produced under the control of a high efficiency regulatory region. The activity of the regulatory region can be determined by the cell type into which the vector is introduced. For a discussion of the regulation of gene expression using antisense genes, see Weintraub, H. et al., 1986, Antisense RNA as a molecular tool for genetic analysis, Reviews—Trends in Genetics, Vol. 1(1), and Mol et al., 1990, FEBS Letters 268:427-430.

[0365] Another aspect of the invention pertains to isolated YSRPs, and biologically active portions thereof. An “isolated” or “purified” polypeptide or biologically active portion thereof is free of some of the cellular material when produced by recombinant DNA techniques, or chemical precursors or other chemicals when chemically synthesized. The language “substantially free of cellular material” includes preparations of YSRP in which the polypeptide is separated from some of the cellular components of the cells in which it is naturally or recombinantly produced. In one embodiment, the language “substantially free of cellular material” includes preparations of a YSRP having less than about 30% (by dry weight) of non-YSRP material (also referred to herein as a “contaminating polypeptide”), more preferably less than about 20% of non-YSRP material, still more preferably less than about 10% of non-YSRP material, and most preferably less than about 5% non-YSRP material.

[0366] When the YSRP or biologically active portion thereof is recombinantly produced, it is also preferably substantially free of culture medium, i.e., culture medium represents less than about 20%, more preferably less than about 10%, and most preferably less than about 5% of the volume of the polypeptide preparation. The language “substantially free of chemical precursors or other chemicals” includes preparations of YSRP in which the polypeptide is separated from chemical precursors or other chemicals that are involved in the synthesis of the polypeptide. In one embodiment, the language “substantially free of chemical precursors or other chemicals” includes preparations of a YSRP having less than about 30% (by dry weight) of chemical precursors or non-YSRP chemicals, more preferably less than about 20% chemical precursors or non-YSRP chemicals, still more preferably less than about 10% chemical precursors or non-YSRP chemicals, and most preferably less than about 5% chemical precursors or non-YSRP chemicals. In preferred embodiments, isolated polypeptides, or biologically active portions thereof, lack contaminating polypeptides from the same organism from which the YSRP is derived. Typically, such polypeptides are produced by recombinant expression of, for example, a Saccharomyces cerevisiae, E. coli or Brassica napus, Glycine max, Zea mays or Oryza sativa YSRP in plants other than Saccharomyces cerevisiae, E. coli, or microorganisms such as C. glutamicum, ciliates, algae or fungi.

[0367] The nucleic acid molecules, polypeptides, polypeptide homologs, fusion polypeptides, primers, vectors, and host cells described herein can be used in one or more of the following methods: identification of Saccharomyces cerevisiae, E. coli or Brassica napus, Glycine max, Zea mays or Oryza sativa and related organisms; mapping of genomes of organisms related to Saccharomyces cerevisiae, E. coli; identification and localization of Saccharomyces cerevisiae, E. coli or Brassica napus, Glycine max, Zea mays or Oryza sativa sequences of interest; evolutionary studies; determination of YSRP regions required for function; modulation of a YSRP activity; modulation of the metabolism of one or more cell functions; modulation of the transmembrane transport of one or more compounds; modulation of stress resistance; and modulation of expression of YSRP nucleic acids.

[0368] The YSRP nucleic acid molecules of the invention are also useful for evolutionary and polypeptide structural studies. The metabolic and transport processes in which the molecules of the invention participate are utilized by a wide variety of prokaryotic and eukaryotic cells; by comparing the sequences of the nucleic acid molecules of the present invention to those encoding similar enzymes from other organisms, the evolutionary relatedness of the organisms can be assessed. Similarly, such a comparison permits an assessment of which regions of the sequence are conserved and which are not, which may aid in determining those regions of the polypeptide that are essential for the functioning of the enzyme. This type of determination is of value for polypeptide engineering studies and may give an indication of what the polypeptide can tolerate in terms of mutagenesis without losing function.

[0369] Manipulation of the YSRP nucleic acid molecules of the invention may result in the production of YSRPs having functional differences from the wild-type YSRPs. These polypeptides may be improved in efficiency or activity, may be present in greater numbers in the cell than is usual, or may be decreased in efficiency or activity.

There are a number of mechanisms by which the alteration of a YSRP of the invention may directly affect stress response and/or stress tolerance. In the case of plants expressing YSRPs, increased transport can lead to improved salt and/or solute partitioning within the plant tissue and organs. By either increasing the number or the activity of transporter molecules which export ionic molecules from the cell, it may be possible to affect the salt and cold tolerance of the cell.

[0370] The effect of the genetic modification in plants, on stress tolerance can be assessed by growing the modified plant under less than suitable conditions and then analyzing the growth characteristics and/or metabolism of the plant. Such analysis techniques are well known to one skilled in the art, and include dry weight, wet weight, polypeptide synthesis, carbohydrate synthesis, lipid synthesis, evapotranspiration rates, general plant and/or crop yield, flowering, reproduction, seed setting, root growth, respiration rates, photosynthesis rates, etc. (Applications of HPLC in Biochemistry in: Laboratory Techniques in Biochemistry and Molecular Biology, vol. 17; Rehm et al., 1993 Biotechnology, vol. 3, Chapter III: Product recovery and purification, page 469-714, VCH: Weinheim; Better, P. A. et al., 1988, Bioseparations: downstream processing for biotechnology, John Wiley and Sons; Kennedy, J. F. and Cabral, J. M. S., 1992, Recovery processes for biological materials, John Wiley and Sons; Shaeiwitz, J. A. and Henry, J. D., 1988, Biochemical separations, in: Ulmann's Encyclopedia of Industrial Chemistry, vol. B3, Chapter 11, page 1-27, VCH: Weinheim; and Dechow, F. J., 1989, Separation and purification techniques in biotechnology, Noyes Publications).

For example, yeast expression vectors comprising the nucleic acids disclosed herein, or fragments thereof, can be constructed and transformed into Saccharomyces cerevisiae using standard protocols. The resulting transgenic cells can then be assayed for fail or alteration of their tolerance to drought, salt, and cold stress. Similarly, plant expression vectors comprising the nucleic acids disclosed herein, or fragments thereof, can be constructed and transformed into an appropriate plant cell such as Arabidopsis, soy, rape, maize, cotton, rice, wheat, Medicago truncatula, etc., using standard protocols. The resulting transgenic cells and/or plants derived therefrom can then be assayed for fail or alteration of their tolerance to drought, salt, cold stress.

[0371] The engineering of one or more genes according to table I and coding for the YSRP of table II of the invention may also result in YSRPs having altered activities which indirectly impact the stress response and/or stress tolerance of algae, plants, ciliates, or fungi, or other microorganisms like C. glutamicum.

[0372] Additionally, the sequences disclosed herein, or fragments thereof, can be used to generate knockout mutations in the genomes of various organisms, such as bacteria, mammalian cells, yeast cells, and plant cells (Girke, T., 1998, The Plant Journal 15:39-48). The resultant knockout cells can then be evaluated for their ability or capacity to tolerate various stress conditions, their response to various stress conditions, and the effect on the phenotype and/or genotype of the mutation. For other methods of gene inactivation, see U.S. Pat. No. 6,004,804 “Non-Chimeric Mutational Vectors” and Puttaraju et al., 1999, Spliceosome-mediated RNA trans-splicing as a tool for gene therapy, Nature Biotechnology 17:246-252.

The aforementioned mutagenesis strategies for YSRPs resulting in increased stress resistance are not meant to be limiting; variations on these strategies will be readily apparent to one skilled in the art. Using such strategies, and incorporating the mechanisms disclosed herein, the nucleic acid and polypeptide molecules of the invention may be utilized to generate algae, ciliates, plants, fungi, or other microorganisms like C. glutamicum expressing mutated YSRP nucleic acid and polypeptide molecules such that the stress tolerance is improved.

[0373] The present invention also provides antibodies that specifically bind to a YSRP, or a portion thereof, as encoded by a nucleic acid described herein. Antibodies can be made by many well-known methods (See, e.g. Harlow and Lane, “Antibodies; A Laboratory Manual,” Cold Spring Harbor Laboratory, Cold Spring Harbor, N.Y., (1988)). Briefly, purified antigen can be injected into an animal in an amount and in intervals sufficient to elicit an immune response. Antibodies can either be purified directly, or spleen cells can be obtained from the animal. The cells can then fused with an immortal cell line and screened for antibody secretion. The antibodies can be used to screen nucleic acid clone libraries for cells secreting the antigen. Those positive clones can then be sequenced. See, for example, Kelly et al., 1992, Bio/Technology 10:163-167; Bebbington et al., 1992, Bio/Technology 10:169-175.

The phrases “selectively binds” and “specifically binds” with the polypeptide refer to a binding reaction that is determinative of the presence of the polypeptide in a heterogeneous population of polypeptides and other biologics. Thus, under designated immunoassay conditions, the specified antibodies bound to a particular polypeptide do not bind in a significant amount to other polypeptides present in the sample. Selective binding of an antibody under such conditions may require an antibody that is selected for its specificity for a particular polypeptide. A variety of immunoassay formats may be used to select antibodies that selectively bind with a particular polypeptide. For example, solid-phase ELISA immunoassays are routinely used to select antibodies selectively immunoreactive with a polypeptide. See Harlow and Lane, “Antibodies, A Laboratory Manual,” Cold Spring Harbor Publications, New York, (1988), for a description of immunoassay formats and conditions that could be used to determine selective binding
In some instances, it is desirable to prepare monoclonal antibodies from various hosts. A description of techniques for preparing such monoclonal antibodies may be found in Stites et al., eds., “Basic and Clinical Immunology,” (Lange Medical Publications, Los Altos, Calif., Fourth Edition) and references cited therein, and in Harlow and Lane, “Antibodies, A Laboratory Manual,” Cold Spring Harbor Publications, New York, (1988).

[0374] Gene expression in plants is regulated by the interaction of protein transcription factors with specific nucleotide sequences within the regulatory region of a gene. One example of transcription factors are polypeptides that contain zinc finger (ZF) motifs. Each ZF module is approximately 30 amino acids long folded around a zinc ion. The DNA recognition domain of a ZF protein is a α-helical structure that inserts into the major grove of the DNA double helix. The module contains three amino acids that bind to the DNA with each amino acid contacting a single base pair in the target DNA sequence. ZF motifs are arranged in a modular repeating fashion to form a set of fingers that recognize a contiguous DNA sequence. For example, a three-fingered ZF motif will recognize 9 bp of DNA. Hundreds of proteins have been shown to contain ZF motifs with between 2 and 37 ZF modules in each protein (Isalan M, et al., 1998 Biochemistry 37(35):12026-33; Moore M, et al., 2001 Proc. Natl. Acad. Sci. USA 98(4):1432-1436 and 1437-1441; U.S. Pat. No. 6,007,988 and U.S. Pat. No. 6,013,453).

The regulatory region of a plant gene contains many short DNA sequences (cis-acting elements) that serve as recognition domains for transcription factors, including ZF proteins. Similar recognition domains in different genes allow the coordinate expression of several genes encoding enzymes in a metabolic pathway by common transcription factors. Variation in the recognition domains among members of a gene family facilitates differences in gene expression within the same gene family, for example, among tissues and stages of development and in response to environmental conditions. Typical ZF proteins contain not only a DNA recognition domain but also a functional domain that enables the ZF protein to activate or repress transcription of a specific gene. Experimentally, an activation domain has been used to activate transcription of the target gene (U.S. Pat. No. 5,789,538 and patent application WO9519431), but it is also possible to link a transcription repressor domain to the ZF and thereby inhibit transcription (patent applications WO00/47754 and WO2001002019). It has been reported that an enzymatic function such as nucleic acid cleavage can be linked to the ZF (patent application WO00/20622)

[0375] The invention provides a method that allows one skilled in the art to isolate the regulatory region of one or more stress related protein encoding genes from the genome of a plant cell and to design zinc finger transcription factors linked to a functional domain that will interact with the regulatory region of the gene. The interaction of the zinc finger protein with the plant gene can be designed in such a manner as to alter expression of the gene and preferably thereby to confer increased yield, preferably under condition of transient and repetitive abiotic stress.

[0376] In particular, the invention provides a method of producing a transgenic plant with a stress related protein coding nucleic acid, wherein expression of the nucleic acid(s) in the plant results in increased tolerance to environmental stress as compared to a wild type plant comprising: (a) transforming a plant cell with an expression vector comprising a stress related protein encoding nucleic acid, and (b) generating from the plant cell a transgenic plant with an increased tolerance to environmental stress as compared to a wild type plant. For such plant transformation, binary vectors such as pBinAR can be used (Höfgen and Willmitzer, 1990 Plant Science 66:221-230). Moreover suitable binary vectors are for example pBIN19, pBI101, pGPTV or pPZP (Hajukiewicz, P. et al., 1994, Plant Mol. Biol., 25: 989-994).

Construction of the binary vectors can be performed by ligation of the cDNA into the T-DNA. 5′ to the cDNA a plant promoter activates transcription of the cDNA. A polyadenylation sequence is located 3′ to the cDNA. Tissue-specific expression can be achieved by using a tissue specific promoter as listed above. Also, any other promoter element can be used. For constitutive expression within the whole plant, the CaMV 35S promoter can be used. The expressed protein can be targeted to a cellular compartment using a signal peptide, for example for plastids, mitochondria or endoplasmic reticulum (Kermode, 1996 Crit. Rev. Plant Sci. 4(15):285-423). The signal peptide is cloned 5′ in frame to the cDNA to archive subcellular localization of the fusion protein. Additionally, promoters that are responsive to abiotic stresses can be used with, such as the Arabidopsis promoter RD29A. One skilled in the art will recognize that the promoter used should be operatively linked to the nucleic acid such that the promoter causes transcription of the nucleic acid which results in the synthesis of a mRNA which encodes a polypeptide.

[0377] Alternate methods of transfection include the direct transfer of DNA into developing flowers via electroporation or Agrobacterium mediated gene transfer. Agrobacterium mediated plant transformation can be performed using for example the GV3101 (pMP90) (Koncz and Schell, 1986 Mol. Gen. Genet. 204:383-396) or LBA4404 (Ooms et al., Plasmid, 1982, 7: 15-29; Hoekema et al., Nature, 1983, 303: 179-180) Agrobacterium tumefaciens strain. Transformation can be performed by standard trans-formation and regeneration techniques (Deblaere et al., 1994 Nucl. Acids. Res. 13:4777-4788; Gelvin and Schilperoort, Plant Molecular Biology Manual, 2nd Ed.-Dordrecht: Kluwer Academic Publ., 1995.-in Sect., Ringbuc Zentrale Signatur: BT11-P ISBN 0-7923-2731-4; Glick, B R and Thompson, J E, Methods in Plant Molecular Biology and Biotechnology, Boca Raton: CRC Press, 1993.-360 S., ISBN 0-8493-5164-2). For example, rapeseed can be transformed via cotyledon or hypocotyl trans-formation (Moloney et al., 1989 Plant Cell Reports 8:238-242; De Block et al., 1989 Plant Physiol. 91:694-701). Use of antibiotics for Agrobacterium and plant selection depends on the binary vector and the Agrobacterium strain used for transformation. Rapeseed selection is normally performed using kanamycin as selectable plant marker. Agrobacterium mediated gene transfer to flax can be performed using, for example, a technique described by Mlynarova et al., 1994 Plant Cell Report 13:282-285. Additionally, transformation of soybean can be performed using for example a technique described in European Patent No. 0424 047, U.S. Pat. No. 5,322,783, European Patent No. 0397 687, U.S. Pat. No. 5,376,543 or U.S. Pat. No. 5,169,770. Transformation of maize can be achieved by particle bombardment, polyethylene glycol mediated DNA uptake or via the silicon carbide fiber technique (see, for example, Freeling and Walbot “The maize handbook” Springer Verlag: New York (1993) ISBN 3-540-97826-7). A specific example of maize transformation is found in U.S. Pat. No. 5,990,387 and a specific example of wheat transformation can be found in PCT Application No. WO 93/07256.

[0378] Growing the modified plants under stress conditions and then screening and analyzing the growth characteristics and/or metabolic activity assess the effect of the genetic modification in plants on increased yield, preferably under condition of transient and repetitive abiotic stress. Such analysis techniques are well known to one skilled in the art. They include next to screening (Römpp Lexikon Biotechnologie, Stuttgart/New York: Georg Thieme Verlag 1992, “screening” p. 701) dry weight, wet weight, protein synthesis, carbohydrate synthesis, lipid synthesis, evapotranspiration rates, general plant and/or crop yield, flowering, reproduction, seed setting, root growth, respiration rates, photosynthesis rates, etc. (Applications of HPLC in Biochemistry in: Laboratory Techniques in Biochemistry and Molecular Biology, vol. 17; Rehm et al., 1993 Biotechnology, vol. 3, Chapter III: Product recovery and purification, page 469-714, VCH: Weinheim; Belter, P. A. et al., 1988 Bioseparations: downstream processing for biotechnology, John Wiley and Sons; Kennedy, J. F. and Cabral, J. M. S., 1992 Recovery processes for biological materials, John Wiley and Sons; Shaeiwitz, J. A. and Henry, J. D., 1988 Biochemical separations, in: Ulmann's Encyclopedia of Industrial Chemistry, vol. B3, Chapter 11, page 1-27, VCH: Weinheim; and Dechow, F. J. (1989) Separation and purification techniques in biotechnology, Noyes Publications).

[0379] In one embodiment, the present invention relates to a method for the identification of a gene product conferring increased yield, preferably under condition of transient and repetitive abiotic stress as compared to a corresponding non-transformed wild type cell in a cell of an organism for example plant, comprising the following steps:

a) contacting, e.g. hybridising, some or all nucleic acid molecules of a sample, e.g. cells, tissues, plants or microorganisms or a nucleic acid library, which can contain a candidate gene encoding a gene product conferring increased yield, e.g. an increased yield-related trait, for example enhanced tolerance to abiotic environmental stress, for example an increased drought tolerance and/or low temperature tolerance and/or an increased nutrient use efficiency, intrinsic yield and/or another mentioned yield-related trait, preferably under condition of transient and repetitive abiotic stress, with a nucleic acid molecule as shown in column 5 or 7 of Table I A or B or a functional homologue thereof;
b) identifying the nucleic acid molecules, which hybridize under relaxed stringent conditions with said nucleic acid molecule, in particular to the nucleic acid molecule sequence shown in column 5 or 7 of Table I and, optionally, isolating the full length cDNA clone or complete genomic clone;
c) identifying the candidate nucleic acid molecules or a fragment thereof in host cells, preferably in a plant cell
d) increasing the expressing of the identified nucleic acid molecules in the host cells for which increased yield, e.g. an increased yield-related trait, for example enhanced tolerance to abiotic environmental stress, for example an increased drought tolerance and/or low temperature tolerance and/or an increased nutrient use efficiency, intrinsic yield and/or another mentioned yield-related trait, preferably under condition of transient and repetitive abiotic stress as desired
e) assaying the level of increased yield, e.g. an increased yield-related trait, for example enhanced tolerance to abiotic environmental stress, for example an increased drought tolerance and/or low temperature tolerance and/or an increased nutrient use efficiency, intrinsic yield and/or another mentioned yield-related trait, preferably under condition of transient and repetitive abiotic stress of the host cells; and
f) identifying the nucleic acid molecule and its gene product which increased expression confers increased yield, e.g. an increased yield-related trait, for example enhanced tolerance to abiotic environmental stress, for example an increased drought tolerance and/or low temperature tolerance and/or an increased nutrient use efficiency, intrinsic yield and/or another mentioned yield-related trait, preferably under condition of transient and repetitive abiotic stress in the host cell compared to the wild type.
Relaxed hybridisation conditions are: After standard hybridisation procedures washing steps can be performed at low to medium stringency conditions usually with washing conditions of 40°-55° C. and salt conditions between 2×SSC and 0,2×SSC with 0,1% SDS in comparison to stringent washing conditions as e.g. 60° to 68° C. with 0,1% SDS. Further examples can be found in the references listed above for the stringend hybridization conditions. Usually washing steps are repeated with increasing stringency and length until a useful signal to noise ratio is detected and depend on many factors as the target, e.g. its purity, GC-content, size etc, the probe, e.g. its length, is it a RNA or a DNA probe, salt conditions, washing or hybridisation temperature, washing or hybridisation time etc.

[0380] In another embodiment, the present invention relates to a method for the identification of a gene product the expression of which confers an increased yield, e.g. an increased yield-related trait, for example enhanced tolerance to abiotic environmental stress, for example an increased drought tolerance and/or low temperature tolerance and/or an increased nutrient use efficiency, intrinsic yield and/or another mentioned yield-related trait, preferably under condition of transient and repetitive abiotic stress in a cell, comprising the following steps:

a) identifying a nucleic acid molecule in an organism, which is at least 20%, preferably 25%, more preferably 30%, even more preferred are 35%. 40% or 50%, even more preferred are 60%, 70% or 80%, most preferred are 90% or 95% or more homolog to the nucleic acid molecule encoding a protein comprising the polypeptide molecule as shown in column 5 or 7 of Table II or comprising a consensus sequence or a polypeptide motif as shown in column 7 of Table IV or being encoded by a nucleic acid molecule comprising a polynucleotide as shown in column 5 or 7 of Table I or a homologue thereof as described herein, for example via homology search in a data bank;
b) enhancing the expression of the identified nucleic acid molecules in the host cells;
c) assaying the level of increased yield, e.g. an increased yield-related trait, for example enhanced tolerance to abiotic environmental stress, for example an increased drought tolerance and/or low temperature tolerance and/or an increased nutrient use efficiency, intrinsic yield and/or another mentioned yield-related trait, preferably under condition of transient and repetitive abiotic stress in the host cells; and
d) identifying the host cell, in which the enhanced expression confers increased yield, e.g. an increased yield-related trait, for example enhanced tolerance to abiotic environmental stress, for example an increased drought tolerance and/or low temperature tolerance and/or an increased nutrient use efficiency, intrinsic yield and/or another mentioned yield-related trait, preferably under condition of transient and repetitive abiotic stress in the host cell compared to a wild type.

[0381] Further, the nucleic acid molecule disclosed herein, in particular the nucleic acid molecule shown column 5 or 7 of Table I A or B, may be sufficiently homologous to the sequences of related species such that these nucleic acid molecules may serve as markers for the construction of a genomic map in related organism or for association mapping. Furthermore natural variation in the genomic regions corresponding to nucleic acids disclosed herein, in particular the nucleic acid molecule shown column 5 or 7 of Table I A or B, or homologous thereof may lead to variation in the activity of the proteins disclosed herein, in particular the proteins comprising polypeptides as shown in column 5 or 7 of Table II A or B or comprising the consensus sequence or the polypeptide motif as shown in column 7 of Table IV, and their homolgous and in consequence in natural variation in tolerance and/or resistance to environmental stress and biomass production.

In consequence natural variation eventually also exists in form of more active allelic variants leading already to a relative increase in the tolerance and/or resistance to environmental stress and biomass production. Different variants of the nucleic acids molecule disclosed herein, in particular the nucleic acid comprising the nucleic acid molecule as shown column 5 or 7 of Table I A or B, which corresponds to different tolerance and/or environmental stress resistance and biomass production levels can be identified and used for marker assisted breeding for increased yield, e.g. an increased yield-related trait, for example enhanced tolerance to abiotic environmental stress, for example an increased drought tolerance and/or low temperature tolerance and/or an increased nutrient use efficiency, intrinsic yield and/or another mentioned yield-related trait, preferably under condition of transient and repetitive abiotic stress.

[0382] Accordingly, the present invention relates to a method for breeding plants for increased yield, preferably under condition of transient and repetitive abiotic stress, comprising

a) selecting a first plant variety with increased yield, e.g. an increased yield-related trait, for example enhanced tolerance to abiotic environmental stress, for example an increased drought tolerance and/or low temperature tolerance and/or an increased nutrient use efficiency, intrinsic yield and/or another mentioned yield-related trait, preferably under condition of transient and repetitive abiotic stress based on increased expression of a nucleic acid of the invention as disclosed herein, in particular of a nucleic acid molecule comprising a nucleic acid molecule as shown in column 5 or 7 of Table I A or B or a polypeptide comprising a polypeptide as shown in column 5 or 7 of Table II A or B or comprising a consensus sequence or a polypeptide motif as shown in column 7 of Table IV, or a homologue thereof as described herein;
b) associating the level of tolerance and/or resistance to environmental stress and biomass production with the expression level or the genomic structure of a gene encoding said polypeptide or said nucleic acid molecule;
c) crossing the first plant variety with a second plant variety, which significantly differs in its level of tolerance and/or resistance to environmental stress and biomass production and
e) identifying, which of the offspring varieties has got increased levels level of tolerance and/or resistance to environmental stress and biomass production by the expression level of said polypeptide or nucleic acid molecule or the genomic structure of the genes encoding said polypeptide or nucleic acid molecule of the invention.
In one embodiment, the expression level of the gene according to step (b) is increased.

[0383] Yet another embodiment of the invention relates to a process for the identification of a compound conferring increased yield, e.g. an increased yield-related trait, for example enhanced tolerance to abiotic environmental stress, for example an increased drought tolerance and/or low temperature tolerance and/or an increased nutrient use efficiency, intrinsic yield and/or another mentioned yield-related trait, preferably under condition of transient and repetitive abiotic stress as compared to a corresponding non-transformed wild type plant cell, a plant or a part thereof in a plant cell, a plant or a part thereof, a plant or a part thereof, comprising the steps:

a) culturing a plant cell; a plant or a part thereof maintaining a plant expressing the polypeptide as shown in column 5 or 7 of Table II or being encoded by a nucleic acid molecule comprising a polynucleotide as shown in column 5 or 7 of Table I or a homologue thereof as described herein or a polynucleotide encoding said polypeptide and conferring an increased yield, e.g. an increased yield-related trait, for example enhanced tolerance to abiotic environmental stress, for example an increased drought tolerance and/or low temperature tolerance and/or an increased nutrient use efficiency, intrinsic yield and/or another mentioned yield-related trait, preferably under condition of transient and repetitive abiotic stress as compared to a corresponding non-transformed wild type plant cell, a plant or a part thereof; a non-transformed wild type plant or a part thereof and providing a readout system capable of interacting with the polypeptide under suitable conditions which permit the interaction of the polypeptide with this readout system in the presence of a chemical compound or a sample comprising a plurality of chemical compounds and capable of providing a detectable signal in response to the binding of a chemical compound to said polypeptide under conditions which permit the expression of said readout system and of the protein as shown in column 5 or 7 of Table II or being encoded by a nucleic acid molecule comprising a polynucleotide as shown in column 5 or 7 of Table I or a homologue thereof as described herein; and
b) identifying if the chemical compound is an effective agonist by detecting the presence or absence or decrease or increase of a signal produced by said readout system.
Said compound may be chemically synthesized or microbiologically produced and/or comprised in, for example, samples, e.g., cell extracts from, e.g., plants, animals or microorganisms, e.g. pathogens. Furthermore, said compound(s) may be known in the art but hitherto not known to be capable of suppressing the polypeptide of the present invention. The reaction mixture may be a cell free extract or may comprise a cell or tissue culture. Suitable set ups for the process for identification of a compound of the invention are known to the person skilled in the art and are, for example, generally described in Alberts et al., Molecular Biology of the Cell, third edition (1994), in particular Chapter 17. The compounds may be, e.g., added to the reaction mixture, culture medium, injected into the cell or sprayed onto the plant.
If a sample containing a compound is identified in the process, then it is either possible to isolate the compound from the original sample identified as containing the compound capable of activating or increasing yield production under condition of transient and repetitive abiotic stress as compared to a corresponding non-transformed wild type, or one can further subdivide the original sample, for example, if it consists of a plurality of different compounds, so as to reduce the number of different substances per sample and repeat the method with the subdivisions of the original sample. Depending on the complexity of the samples, the steps described above can be performed several times, preferably until the sample identified according to the said process only comprises a limited number of or only one substance(s). Preferably said sample comprises substances of similar chemical and/or physical properties, and most preferably said substances are identical. Preferably, the compound identified according to the described method above or its derivative is further formulated in a form suitable for the application in plant breeding or plant cell and tissue culture.
The compounds which can be tested and identified according to said process may be expression libraries, e.g., cDNA expression libraries, peptides, proteins, nucleic acids, antibodies, small organic compounds, hormones, peptidomimetics, PNAs or the like (Milner, Nature Medicine 1 (1995), 879-880; Hupp, Cell 83 (1995), 237-245; Gibbs, Cell 79 (1994), 193-198 and references cited supra). Said compounds can also be functional derivatives or analogues of known inhibitors or activators. Methods for the preparation of chemical derivatives and analogues are well known to those skilled in the art and are described in, for example, Beilstein, Handbook of Organic Chemistry, Springer edition New York Inc., 175 Fifth Avenue, New York, N.Y. 10010 U.S.A. and Organic Synthesis, Wiley, New York, USA. Furthermore, said derivatives and analogues can be tested for their effects according to methods known in the art. Furthermore, peptidomimetics and/or computer aided design of appropriate derivatives and analogues can be used, for example, according to the methods described above. The cell or tissue that may be employed in the process preferably is a host cell, plant cell or plant tissue of the invention described in the embodiments hereinbefore.
Thus, in a further embodiment the invention relates to a compound obtained or identified according to the method for identifying an agonist of the invention said compound being an antagonist of the polypeptide of the present invention.
Accordingly, in one embodiment, the present invention further relates to a compound identified by the method for identifying a compound of the present invention.

[0384] In one embodiment, the invention relates to an antibody specifically recognizing the compound or agonist of the present invention.

[0385] The invention also relates to a diagnostic composition comprising at least one of the aforementioned nucleic acid molecules, antisense nucleic acid molecule, RNAi, snRNA, dsRNA, siRNA, miRNA, ta-siRNA, cosuppression molecule, ribozyme, vectors, proteins, antibodies or compounds of the invention and optionally suitable means for detection.

The diagnostic composition of the present invention is suitable for the isolation of mRNA from a cell and contacting the mRNA so obtained with a probe comprising a nucleic acid probe as described above under hybridizing conditions, detecting the presence of mRNA hybridized to the probe, and thereby detecting the expression of the protein in the cell. Further methods of detecting the presence of a protein according to the present invention comprise immunotechniques well known in the art, for example enzyme linked immunoadsorbent assay. Furthermore, it is possible to use the nucleic acid molecules according to the invention as molecular markers or primers in plant breeding. Suitable means for detection are well known to a person skilled in the art, e.g. buffers and solutions for hydridization assays, e.g. the afore-mentioned solutions and buffers, further and means for Southern-, Western-, Northern- etc.-blots, as e.g. described in Sambrook et al. are known. In one embodiment diagnostic composition contain PCR primers designed to specifically detect the presence or the expression level of the nucleic acid molecule to be reduced in the process of the invention, e.g. of the nucleic acid molecule of the invention, or to discriminate between different variants or alleles of the nucleic acid molecule of the invention or which activity is to be reduced in the process of the invention.

[0386] In another embodiment, the present invention relates to a kit comprising the nucleic acid molecule, the vector, the host cell, the polypeptide, or the antisense, RNAi, snRNA, dsRNA, siRNA, miRNA, ta-siRNA, cosuppression molecule, or ribozyme molecule, or the viral nucleic acid molecule, the antibody, plant cell, the plant or plant tissue, the harvestable part, the propagation material and/or the compound and/or agonist identified according to the method of the invention.

The compounds of the kit of the present invention may be packaged in containers such as vials, optionally with/in buffers and/or solution. If appropriate, one or more of said components might be packaged in one and the same container. Additionally or alternatively, one or more of said components might be adsorbed to a solid support as, e.g. a nitrocellulose filter, a glass plate, a chip, or a nylon membrane or to the well of a micro titerplate. The kit can be used for any of the herein described methods and embodiments, e.g. for the production of the host cells, transgenic plants, pharmaceutical compositions, detection of homologous sequences, identification of antagonists or agonists, as food or feed or as a supplement thereof or as supplement for the treating of plants, etc.
Further, the kit can comprise instructions for the use of the kit for any of said embodiments.
In one embodiment said kit comprises further a nucleic acid molecule encoding one or more of the aforementioned protein, and/or an antibody, a vector, a host cell, an antisense nucleic acid, a plant cell or plant tissue or a plant. In another embodiment said kit comprises PCR primers to detect and discriminate the nucleic acid molecule to be reduced in the process of the invention, e.g. of the nucleic acid molecule of the invention.

[0387] In a further embodiment, the present invention relates to a method for the production of an agricultural composition providing the nucleic acid molecule for the use according to the process of the invention, the nucleic acid molecule of the invention, the vector of the invention, the antisense, RNAi, snRNA, dsRNA, siRNA, miRNA, ta-siRNA, cosuppression molecule, ribozyme, or antibody of the invention, the viral nucleic acid molecule of the invention, or the polypeptide of the invention or comprising the steps of the method according to the invention for the identification of said compound or agonist; and formulating the nucleic acid molecule, the vector or the polypeptide of the invention or the agonist, or compound identified according to the methods or processes of the present invention or with use of the subject matters of the present invention in a form applicable as plant agricultural composition.

[0388] In another embodiment, the present invention relates to a method for the production of the plant culture composition comprising the steps of the method of the present invention; and formulating the compound identified in a form acceptable as agri-cultural composition.

Under “acceptable as agricultural composition” is understood, that such a composition is in agreement with the laws regulating the content of fungicides, plant nutrients, herbicides, etc. Preferably such a composition is without any harm for the protected plants and the animals (humans included) fed therewith.

[0389] Throughout this application, various publications are referenced. The disclosures of all of these publications and those references cited within those publications in their entireties are hereby incorporated by reference into this application in order to more fully describe the state of the art to which this invention pertains.

It should also be understood that the foregoing relates to preferred embodiments of the present invention and that numerous changes and variations may be made therein without departing from the scope of the invention. The invention is further illustrated by the following examples, which are not to be construed in any way as limiting. On the contrary, it is to be clearly understood that various other embodiments, modifications and equivalents thereof, which, after reading the description herein, may suggest themselves to those skilled in the art without departing from the spirit of the present invention and/or the scope of the claims.

[0390] In one embodiment, the increased yield results in an increase of the production of a specific ingredient including, without limitation, an enhanced and/or improved sugar content or sugar composition, an enhanced or improved starch content and/or starch composition, an enhanced and/or improved oil content and/or oil composition (such as enhanced seed oil content), an enhanced or improved protein content and/or protein composition (such as enhanced seed protein content), an enhanced and/or improved vitamin content and/or vitamin composition, or the like.

Further, in one embodiment, the method of the present invention comprises harvesting the plant or a part of the plant produced or planted and producing fuel with or from the harvested plant or part thereof. Further, in one embodiment, the method of the present invention comprises harvesting a plant part useful for starch isolation and isolating starch from this plant part, wherein the plant is plant useful for starch production, e.g. potato. Further, in one embodiment, the method of the present invention comprises harvesting a plant part useful for oil isolation and isolating oil from this plant part, wherein the plant is plant useful for oil production, e.g. oil seed rape or Canola, cotton, soy, or sunflower.
For example, in one embodiment, the oil content in the corn seed is increased. Thus, the present invention relates to the production of plants with increased oil content per acre (harvestable oil).
For example, in one embodiment, the oil content in the soy seed is increased. Thus, the present invention relates to the production of soy plants with increased oil content per acre (harvestable oil).
For example, in one embodiment, the oil content in the OSR seed is increased. Thus, the present invention relates to the production of OSR plants with increased oil content per acre (harvestable oil).
For example, the present invention relates to the production of cotton plants with increased oil content per acre (harvestable oil).
The present invention is illustrated by the following examples which are not meant to be limiting.
For the purposes of the invention, as a rule the plural is intended to encompass the singular and vice versa.

[0391] In one embodiment the subject matter of the invention is a method for producing a transgenic plant cell, a plant or a part thereof with increased yield, preferably under condition of transient and repetitive abiotic stress as compared to a corresponding non-transformed wild type plant cell, a plant or a part thereof by increasing or generating one or more activities selected from the group consisting of: phosphoenolpyruvate carboxylkinase, arginine/alanine aminopeptidase, D-alanyl-D-alanine carboxypeptidase, diacylglycerol pyrophosphate phosphatase, dityrosine transporter, farnesyl-diphosphate farnesyl transferase, NAD+-dependent betaine aldehyde dehydrogenase, serine hydrolase, transcriptional regulator involved in conferring resistance to ketoconazole, uridine kinase, yal043c-a-protein, ybr071w-protein, and ydr445c-protein.

In a further embodiment in said method the activity of at least one polypeptide comprising a polypeptide selected from the group consisting of:
[0392] (i) a polypeptide comprising a polypeptide, a consensus sequence or at least one polypeptide motif as depicted in column 5 or 7 of Table II or of Table IV, respectively; or
[0393] (ii) an expression product of a nucleic acid molecule comprising a polynucleotide as depicted in column 5 or 7 of Table I,
[0394] (iii) or a functional equivalent of (i) or (ii); is increased or generated.
   In one embodiment in the method of the invention the expression of at least one nucleic acid molecule comprising a nucleic acid molecule selected from the group consisting of:
[0395] a) a nucleic acid molecule encoding the polypeptide shown in column 5 or 7 of Table II;
[0396] b) a nucleic acid molecule shown in column 5 or 7 of Table I;
[0397] c) a nucleic acid molecule, which, as a result of the degeneracy of the genetic code, can be derived from a polypeptide sequence depicted in column 5 or 7 of Table II and confers an increased yield, preferably under condition of transient and repetitive abiotic stress as compared to a corresponding non-transformed wild type plant cell, a plant or a part thereof;
[0398] d) a nucleic acid molecule having at least 30% identity with the nucleic acid molecule sequence of a polynucleotide comprising the nucleic acid molecule shown in column 5 or 7 of Table I and confers an increased yield, preferably under condition of transient and repetitive abiotic stress as compared to a corresponding non-transformed wild type plant cell, a plant or a part thereof;
[0399] e) a nucleic acid molecule encoding a polypeptide having at least 30% identity with the amino acid sequence of the polypeptide encoded by the nucleic acid molecule of (a) to (c) and having the activity represented by a nucleic acid molecule comprising a polynucleotide as depicted in column 5 of Table I and confers an increased yield, preferably under condition of transient and repetitive abiotic stress as compared to a corresponding non-transformed wild type plant cell, a plant or a part thereof;
[0400] f) nucleic acid molecule which hybridizes with a nucleic acid molecule of (a) to (c) under stringent hybridization conditions and confers an increased yield, preferably under condition of transient and repetitive abiotic stress as compared to a corresponding non-transformed wild type plant cell, a plant or a part thereof;
[0401] g) a nucleic acid molecule encoding a polypeptide which can be isolated with the aid of monoclonal or polyclonal antibodies made against a polypeptide encoded by one of the nucleic acid molecules of (a) to (e) and having the activity represented by the nucleic acid molecule comprising a polynucleotide as depicted in column 5 of Table I;
[0402] h) a nucleic acid molecule encoding a polypeptide comprising the consensus sequence or one or more polypeptide motifs as shown in column 7 of Table IV and preferably having the activity represented by a nucleic acid molecule comprising a polynucleotide as depicted in column 5 of Table II or IV;
[0403] i) a nucleic acid molecule encoding a polypeptide having the activity represented by a protein as depicted in column 5 of Table II and confers an increased yield, preferably under condition of transient and repetitive abiotic stress as compared to a corresponding non-transformed wild type plant cell, a plant or a part thereof;
[0404] j) nucleic acid molecule which comprises a polynucleotide, which is obtained by amplifying a cDNA library or a genomic library using the primers in column 7 of Table III and preferably having the activity represented by a nucleic acid molecule comprising a polynucleotide as depicted in column 5 of Table II or IV;

[0405] and
[0406] k) a nucleic acid molecule which is obtainable by screening a suitable nucleic acid library under stringent hybridization conditions with a probe comprising a complementary sequence of a nucleic acid molecule of (a) or (b) or with a fragment thereof, having at least 15 nt, preferably 20 nt, 30 nt, 50 nt, 100 nt, 200 nt or 500 nt of a nucleic acid molecule complementary to a nucleic acid molecule sequence characterized in (a) to (e) and encoding a polypeptide having the activity represented by a protein comprising a polypeptide as depicted in column 5 of Table II;

[0407] is increased or generated.

In one embodiment the invention is directed to a trangenic plant cell, a plant or a part thereof with increased yield, preferably under condition of transient and repetitive abiotic stress as compared to a corresponding non-transformed wild type plant cell, a plant or a part thereof produced by the method of the invention as described above. In a further embodiment said transgenic plant cell, a plant or a part thereof is derived from a monocotyledonous plant or from a dicotyledonous plant or from a gymnosperm plant, preferably spruce, pine and fir.
In an other embodiment the transgenic plant cell, a plant or a part thereof of the invention as disclosed above, is derived from a plant selected from the group consisting of maize, wheat, rye, oat, triticale, rice, barley, soybean, peanut, cotton, oil seed rape, including canola and winter oil seed rape, corn, manihot, pepper, sunflower, flax, borage, safflower, linseed, primrose, rapeseed, turnip rape, tagetes, solanaceous plants, potato, tobacco, eggplant, tomato, Vicia species, pea, alfalfa, coffee, cacao, tea, Salix species, oil palm, coconut, perennial grass, forage crops and Arabidopsis thaliana.
In one embodiment a further subject matter of the invention is a seed produced by a transgenic plant of the present invention, wherein the seed is genetically homozygous for a transgene conferring increased yield, preferably under condition of transient and repetitive abiotic stress as compared to a corresponding non-transformed wild type plant cell, a plant or a part thereof resulting in an increased yield under condition of transient and repetitive abiotic stress as compared to a corresponding non-transformed wild type plant.
In one embodiment the subject matter of the invention is an isolated nucleic acid molecule comprising a nucleic acid molecule selected from the group consisting of:
[0408] a) a nucleic acid molecule encoding the polypeptide shown in column 5 or 7 of Table II B;
[0409] b) a nucleic acid molecule shown in column 5 or 7 of Table I B;
[0410] c) a nucleic acid molecule, which, as a result of the degeneracy of the genetic code, can be derived from a polypeptide sequence depicted in column 5 or 7 of Table II and confers an increased yield, preferably under condition of transient and repetitive abiotic stress as compared to a corresponding non-transformed wild type plant cell, a plant or a part thereof;
[0411] d) a nucleic acid molecule having at least 30% identity with the nucleic acid molecule sequence of a polynucleotide comprising the nucleic acid molecule shown in column 5 or 7 of Table I and confers an increased yield, preferably under condition of transient and repetitive abiotic stress as compared to a corresponding non-transformed wild type plant cell, a plant or a part thereof;
[0412] e) a nucleic acid molecule encoding a polypeptide having at least 30% identity with the amino acid sequence of the polypeptide encoded by the nucleic acid molecule of (a) to (c) and having the activity represented by a nucleic acid molecule comprising a polynucleotide as depicted in column 5 of Table I and confers an increased yield, preferably under condition of transient and repetitive abiotic stress as compared to a corresponding non-transformed wild type plant cell, a plant or a part thereof;
[0413] f) nucleic acid molecule which hybridizes with a nucleic acid molecule of (a) to (c) under stringent hybridization conditions and confers increased yield, preferably under condition of transient and repetitive abiotic stress as compared to a corresponding non-transformed wild type plant cell, a plant or a part thereof;
[0414] g) a nucleic acid molecule encoding a polypeptide which can be isolated with the aid of monoclonal or polyclonal antibodies made against a polypeptide encoded by one of the nucleic acid molecules of (a) to (e) and having the activity represented by the nucleic acid molecule comprising a polynucleotide as depicted in column 5 of Table I;
[0415] h) a nucleic acid molecule encoding a polypeptide comprising the consensus sequence or one or more polypeptide motifs as shown in column 7 of Table IV and preferably having the activity represented by a nucleic acid molecule comprising a polynucleotide as depicted in column 5 of Table II or IV;
[0416] i) a nucleic acid molecule encoding a polypeptide having the activity represented by a protein as depicted in column 5 of Table II and confers an increased yield, preferably under condition of transient and repetitive abiotic stress as compared to a corresponding non-transformed wild type plant cell, a plant or a part thereof;
[0417] j) nucleic acid molecule which comprises a polynucleotide, which is obtained by amplifying a cDNA library or a genomic library using the primers in column 7 of Table III and preferably having the activity represented by a nucleic acid molecule comprising a polynucleotide as depicted in column 5 of Table II or IV;

[0418] and
[0419] k) a nucleic acid molecule which is obtainable by screening a suitable nucleic acid library under stringent hybridization conditions with a probe comprising a complementary sequence of a nucleic acid molecule of (a) or (b) or with a fragment thereof, having at least 15 nt, preferably 20 nt, 30 nt, 50 nt, 100 nt, 200 nt or 500 nt of a nucleic acid molecule complementary to a nucleic acid molecule sequence characterized in (a) to (e) and encoding a polypeptide having the activity represented by a protein comprising a polypeptide as depicted in column 5 of Table II;
   whereby the nucleic acid molecule according to (a) to (k) is at least in one or more nucleotides different from the sequence depicted in column 5 or 7 of Table I A and preferably which encodes a protein which differs at least in one or more amino acids from the protein sequences depicted in column 5 or 7 of Table II A.
   In a further embodiment the subject matter of the invention is a nucleic acid construct which confers the expression of nucleic acid molecule comprising a nucleic acid molecule selected from the group consisting of:
[0420] l) a nucleic acid molecule encoding the polypeptide shown in column 5 or 7 of Table II B;
[0421] m) a nucleic acid molecule shown in column 5 or 7 of Table I B;
[0422] n) a nucleic acid molecule, which, as a result of the degeneracy of the genetic code, can be derived from a polypeptide sequence depicted in column 5 or 7 of Table II and confers an increased yield, preferably under condition of transient and repetitive abiotic stress as compared to a corresponding non-transformed wild type plant cell, a plant or a part thereof;
[0423] o) a nucleic acid molecule having at least 30% identity with the nucleic acid molecule sequence of a polynucleotide comprising the nucleic acid molecule shown in column 5 or 7 of Table I and confers an increased yield, preferably under condition of transient and repetitive abiotic stress as compared to a corresponding non-transformed wild type plant cell, a plant or a part thereof;
[0424] p) a nucleic acid molecule encoding a polypeptide having at least 30% identity with the amino acid sequence of the polypeptide encoded by the nucleic acid molecule of (a) to (c) and having the activity represented by a nucleic acid molecule comprising a polynucleotide as depicted in column 5 of Table I and confers an increased yield, preferably under condition of transient and repetitive abiotic stress as compared to a corresponding non-transformed wild type plant cell, a plant or a part thereof;
[0425] q) nucleic acid molecule which hybridizes with a nucleic acid molecule of (a) to (c) under stringent hybridization conditions and confers increased yield, preferably under condition of transient and repetitive abiotic stress as compared to a corresponding non-transformed wild type plant cell, a plant or a part thereof;
[0426] r) a nucleic acid molecule encoding a polypeptide which can be isolated with the aid of monoclonal or polyclonal antibodies made against a polypeptide encoded by one of the nucleic acid molecules of (a) to (e) and having the activity represented by the nucleic acid molecule comprising a polynucleotide as depicted in column 5 of Table I;
[0427] s) a nucleic acid molecule encoding a polypeptide comprising the consensus sequence or one or more polypeptide motifs as shown in column 7 of Table IV and preferably having the activity represented by a nucleic acid molecule comprising a polynucleotide as depicted in column 5 of Table II or IV;
[0428] t) a nucleic acid molecule encoding a polypeptide having the activity represented by a protein as depicted in column 5 of Table II and confers an increased yield, preferably under condition of transient and repetitive abiotic stress as compared to a corresponding non-transformed wild type plant cell, a plant or a part thereof;
[0429] u) nucleic acid molecule which comprises a polynucleotide, which is obtained by amplifying a cDNA library or a genomic library using the primers in column 7 of Table III and preferably having the activity represented by a nucleic acid molecule comprising a polynucleotide as depicted in column 5 of Table II or IV;

[0430] and
[0431] v) a nucleic acid molecule which is obtainable by screening a suitable nucleic acid library under stringent hybridization conditions with a probe comprising a complementary sequence of a nucleic acid molecule of (a) or (b) or with a fragment thereof, having at least 15 nt, preferably 20 nt, 30 nt, 50 nt, 100 nt, 200 nt or 500 nt of a nucleic acid molecule complementary to a nucleic acid molecule sequence characterized in (a) to (e) and encoding a polypeptide having the activity represented by a protein comprising a polypeptide as depicted in column 5 of Table II;
   whereby, in one embodiment, the nucleic acid molecule according to (a) to (k) is at least in one or more nucleotides different from the sequence depicted in column 5 or 7 of Table I A and preferably which encodes a protein which differs at least in one or more amino acids from the protein sequences depicted in column 5 or 7 of Table II A, and the nucleic acid construct comprises one or more regulatory elements, whereby expression of the nucleic acid in a host cell results in increased yield, preferably under condition of transient and repetitive abiotic stress as compared to a corresponding non-transformed wild type plant cell, a plant or a part thereof.
   In one embodiment a further subject matter of the invention is a vector comprising the nucleic acid molecule as disclosed above or the nucleic acid construct as disclosed above, whereby expression of said coding nucleic acid in a host cell results in increased yield, preferably under condition of transient and repetitive abiotic stress as compared to a corresponding non-transformed wild type plant cell, a plant or a part thereof.
   In one embodiment an other subject matter of the invention is a host cell, which has been transformed stably or transiently with the vector as disclosed above or the nucleic acid molecule as disclosed above or the nucleic acid construct as disclosed above and which shows due to the transformation an increased yield, preferably under condition of transient and repetitive abiotic stress as compared to a corresponding non-transformed wild type plant cell, a plant or a part thereof.
   In one embodiment the invention is directed to a process for producing a polypeptide, wherein the polypeptide is expressed in a host cell as disclosed above.
   Said polypeptide produced by the process as disclosed above or encoded by the nucleic acid molecule as disclosed above can distinguishes over the sequence as shown in table II by one or more amino acids
   In one embodiment an other subject matter of the invention is an antibody, which binds specifically to the above described polypeptide.
   In one embodiment an other subject matter of the invention is a plant tissue, propagation material, harvested material or a plant comprising the host cell as disclosed above.
   In one embodiment an other subject matter of the invention is a process for the identification of a compound conferring an increased yield, preferably under condition of transient and repetitive abiotic stress as compared to a corresponding non-transformed wild type plant cell, a plant or a part thereof in a plant cell, a plant or a part thereof, a plant or a part thereof, comprising the steps:
[0432] k) culturing a plant cell; a plant or a part thereof maintaining a plant expressing the polypeptide encoded by the nucleic acid molecule of the invention as disclosed above conferring an increased yield under condition of transient and repetitive abiotic stress as compared to a corresponding non-transformed wild type plant cell, a plant or a part thereof; a non-transformed wild type plant or a part thereof and a readout system capable of interacting with the polypeptide under suitable conditions which permit the interaction of the polypeptide with said readout system in the presence of a compound or a sample comprising a plurality of compounds and capable of providing a detectable signal in response to the binding of a compound to said polypeptide under conditions which permit the expression of said readout system and of the polypeptide encoded by the nucleic acid molecule of the invention as disclosed above conferring an increased yield, preferably under condition of transient and repetitive abiotic stress as compared to a corresponding non-transformed wild type plant cell, a plant or a part thereof; a non-transformed wild type plant or a part thereof;
[0433] l) identifying if the compound is an effective agonist by detecting the presence or absence or increase of a signal produced by said readout system.
   In one embodiment a further subject matter of the invention is a method for the production of an agricultural composition comprising the steps of the above disclosed process for the identification of a compound conferring an increased yield and formulating the compound identified in that process in a form acceptable for an application in agriculture.
   In one embodiment a further subject matter of the invention is a composition comprising the nucleic acid molecule as disclosed above, the polypeptide as disclosed above, the nucleic acid construct as disclosed above, the vector as disclosed above, the compound as disclosed above, the antibody as disclosed above, and optionally an agricultural acceptable carrier.
   In one embodiment a subject matter of the invention is an isolated polypeptide as depicted in table II, preferably table II B which is selected from yeast, preferably Saccharomyces cerevisiae, or E. coli.
   In one embodiment a subject matter of the invention is a method of producing a transgenic plant cell, a plant or a part thereof with increased yield, preferably under condition of transient and repetitive abiotic stress compared to a corresponding non transformed wild type plant cell, a plant or a part thereof, wherein the increased yield under condition of transient and repetitive abiotic stress is increased by expression of a polypeptide encoded by a nucleic acid of the invention as disclosed above and results in increased yield, preferably under condition of transient and repetitive abiotic stress as compared to a corresponding non-transformed wild type plant cell, a plant or a part thereof, comprising
[0434] m) transforming a plant cell, or a part of a plant with an expression vector of the invention as disclosed above and
[0435] n) generating from the plant cell or the part of a plant a transgenic plant with increased yield, preferably under condition of transient and repetitive abiotic stress as compared to a corresponding non-transformed wild type plant.
   In one embodiment a subject matter of the invention is a method of producing a transgenic plant with increased yield compared to a corresponding non transformed wild type plant, preferably under conditions of environmental stress by increasing or generating one or more activities selected from the group of Yield-Related Proteins (YRP) or Yield and Stress-Related Proteins (YSRP) consisting of: phosphoenolpyruvate carboxylkinase, arginine/alanine aminopeptidase, D-alanyl-D-alanine carboxypeptidase, diacylglycerol pyrophosphate phosphatase, dityrosine transporter, farnesyl-diphosphate farnesyl transferase, NAD+-dependent betaine aldehyde dehydrogenase, serine hydrolase, transcriptional regulator involved in conferring resistance to ketoconazole, uridine kinase, yal043c-a-protein, ybr071w-protein, and ydr445c-protein.
   In one embodiment a subject matter of the invention is a method of producing a transgenic plant with increased yield compared to a corresponding non transformed wild type plant, preferably under conditions of environmental stress comprising
[0436] o) transforming a plant cell or a part of a plant with an expression vector of the invention as disclosed above and
[0437] p) generating from the plant cell or the part of a plant a transgenic plant with increased yield, preferably under condition of transient and repetitive abiotic stress as compared to a corresponding non-transformed wild type plant.
   In one embodiment a subject matter of the invention is a use of a YRP or YSRP encoding nucleic acid molecule selected from the group comprising the nucleic acid of the invention as disclosed above for preparing a plant cell with increased yield, preferably under condition of transient and repetitive abiotic stress as compared to a corresponding non-transformed wild type plant cell, a plant or part of a plant.
   In one embodiment a subject matter of the invention is a use of a YRP or YSRP encoding nucleic acid molecule selected from the group comprising the nucleic acid of the invention as disclosed above or parts thereof as markers for selection of plants or plant cells with increased yield, preferably under condition of transient and repetitive abiotic stress as compared to a corresponding non-transformed wild type plant cell; a non-transformed wild type plant or a part thereof.
   In one embodiment a subject matter of the invention is a use of a YRP or YSRP encoding nucleic acid molecule selected from the group comprising the nucleic acid of the invention as disclosed above or parts thereof as markers for detection of stress in plants or plant cells.
   In one embodiment a subject matter of the invention is a transformed plant cell of the invention as disclosed above, wherein the transient and repetitive abiotic environmental stress is selected from the group comprised of salinity, drought, temperature, metal, chemical, pathogenic and oxidative stresses, or combinations thereof.
   In one embodiment a subject matter of the invention is a transformed plant cell of the invention as disclosed above, wherein the transient and repetitive abiotic environmental stress is drought, preferably cycling drought.
   In one embodiment a subject matter of the invention is a transgenic plant cell comprising a nucleic acid molecule encoding a polypeptide having a activity selected from the group of Yield-Related Proteins (YRP) or Yield and Stress-Related Proteins (YSRP) consisting of: phosphoenolpyruvate carboxylkinase, arginine/alanine aminopeptidase, D-alanyl-D-alanine carboxypeptidase, diacylglycerol pyrophosphate phosphatase, dityrosine transporter, farnesyl-diphosphate farnesyl transferase, NAD+-dependent betaine aldehyde dehydrogenase, serine hydrolase, transcriptional regulator involved in conferring resistance to ketoconazole, uridine kinase, yal043c-a-protein, ybr071w-protein, and ydr445c-protein, wherein said polypeptide confers increased yield, preferably under condition of transient and repetitive abiotic stress as compared to a corresponding non-transformed wild type plant cell, a plant or part thereof, preferably when said polypeptide is overexpressed.
   In one embodiment a subject matter of the invention is a plant of the invention as disclosed above that has
[0438] i) an increased yield under transient and repetitive nutrient limited conditions where said condition would be limiting for growth for a non-transformed wild type plant cell, a plant or part thereof,
[0439] ii) an increased yield under conditions where water would be limiting for growth for a non-transformed wild type plant cell, a plant or part thereof,
[0440] iii) a increased yield under conditions of drought, preferably cycling drought where said conditions would be limiting for growth for a non-transformed wild type plant cell, a plant or part thereof

[0441] and/or
[0442] iv) a increased yield under conditions of low humidity where said conditions would be limiting for growth for a non-transformed wild type plant cell, a plant or part thereof.
   In one embodiment a subject matter of the invention is a method for increasing the yield per acre in mega-environments where the plants do not achieve or no longer achieve their yield potential by cultivating a plant of the respective class/genera as disclosed above.
   In one embodiment a subject matter of the invention is a method for increasing the yield per acre in mega environments comprising the steps:
[0443] performing a soil analysis to measure the level of nutrients available in the soil,
[0444] comparing the result with the value necessarily for achieving the yield potential of a class/genera of a plant
[0445] cultivating a plant of the respective class/genera as disclosed above in case at east one nutrient is limited.
   In one embodiment a subject matter of the invention is a method for increasing the yield per acre in mega environments comprising the steps:
[0446] measuring the precipitation over a time period of at least one plant generation,
[0447] comparing with the value for achieving the yield potential of a class /genera of a plant
[0448] cultivating a plant of the respective class/genera as disclosed above in case the precipitation is decreased.
   In one embodiment a subject matter of the invention is a method for increasing the yield per acre in mega environments comprising the steps:
[0449] measuring the time periods between the rainfalls over a time period of at least one plant generation,
[0450] comparing with the value for achieving the yield potential of a class /genera of a plant
[0451] cultivating a plant of the respective class/genera as disclosed above in case the dry season is increased.

### EXAMPLE 1

### Engineering Stress-Tolerant Arabidopsis Plants by Over-Expressing Genes Coding for YRP or YSRP

[0452] Cloning of the inventive sequences as shown in table I, column 5 for the expression in plants Unless otherwise specified, standard methods as described in Sambrook et al., Molecular Cloning: A laboratory manual, Cold Spring Harbor 1989, Cold Spring Harbor Laboratory Press are used.

[0453] The inventive sequences as shown in table I, column 5 and 7, were amplified by PCR as described in the protocol of the Pfu Ultra, Pfu Turbo or Herculase DNA polymerase (Stratagene).

The composition for the protocol of the Pfu Ultra, Pfu Turbo or Herculase DNA polymerase was as follows: 1×PCR buffer (Stratagene), 0.2 mM of each dNTP, 100 ng genomic DNA of Saccharomyces cerevisiae (strain S288C; Research Genetics, Inc., now Invitrogen) or Escherichia coli (strain MG1655; E. coli Genetic Stock Center), 50 μmol forward primer, 50 μmol reverse primer, 2.5 u Pfu Ultra, Pfu Turbo or Herculase DNA polymerase.
The amplification cycles were as follows:
1 cycle of 2-3 minutes at 94-95° C., followed by 25-36 cycles of in each case 30-60 seconds at 94-95° C., 30-45 seconds at 50-60° C. and 210-480 seconds at 72° C., followed by 1 cycle of 5-10 minutes at 72° C., then 4° C.

[0454] ORF specific primer pairs for the genes to be expressed are shown in table III, column 7. The following adapter sequences were added to Saccharomyces cerevisiae ORF specific primers (see table III) for cloning purposes:

| i) foward primer: | |
|---|---|
| 5′-GGAATTCCAGCTGACCACC-3′ | SEQ ID NO: 1 |
| ii) reverse primer: | |
| 5′-GATCCCCGGGAATTGCCATG-3′ | SEQ ID NO: 2 |

[0455] These adaptor sequences allow cloning of the ORF into the various vectors containing the Resgen adaptors, see table VII . . .
   The following adapter sequences were added to Escherichia coli. ORF specific primers for cloning purposes:

| iii) forward primer: | |
|---|---|
| 5′-TTGCTCTTCC-3′ | SEQ ID NO: 3 |
| iiii) reverse primer: | |
| 5′-TTGCTCTTCG-3′ | SEQ ID NO: 4 |

[0456] The adaptor sequences allow cloning of the ORF into the various vectors containing the Colic adaptors, see table VII
   Therefore for amplification and cloning of Saccharomyces cerevisiae SEQ ID NO: 724, a primer consisting of the adaptor sequence i) and the ORF specific sequence SEQ ID NO: 726 and a second primer consisting of the adaptor sequence ii) and the ORF specific sequence SEQ ID NO: 727 were used.
   For amplification and cloning of Echerischia coli SEQ ID NO: 63, a primer consisting of the adaptor sequence iii) and the ORF specific sequence SEQ ID NO: 615 and a second primer consisting of the adaptor sequence iiii) and the ORF specific sequence SEQ ID NO: 616 were used.
   Following these examples every sequence disclosed in table I, preferably column 5, can be cloned by fusing the adaptor sequences to the respective specific primers sequences as disclosed in table III, column 7.

TABLE VII
Overview of the different vectors used for cloning the ORFs and shows their
SEQIDs (column A), their vector names (column B), the promotors they contain for
expression of the ORFs (column C), the additional artificial targeting sequence (column
D), the adapter sequence (column E), the expression type conferred by the promoter
mentioned in column B (column F) and the figure number (column G).

| A | | C | D | E | | |
|---|---|---|---|---|---|---|
| Seq | B | Promoter | Target | Adapter | F | G |
| ID | Vector Name | Name | Sequence | Sequence | Expression Type | FIG. |
| 9 | pMTX0270p | Super | | Colic | non targeted constitutive expression | 6 |
| | | | | | preferentially in green tissues | |
| 31 | pMTX155 | Big35S | | Resgen | non targeted constitutive expression | 7 |
| | | | | | preferentially in green tissues | |
| 32 | VC-MME354- | Super | FNR | Resgen | plastidic targeted constitutive | 3 |
| | 1QCZ | | | | expression preferentially in green | |
| | | | | | tissues | |
| 34 | VC-MME356- | Super | IVD | Resgen | mitochondric targeted constitutive | 8 |
| | 1QCZ | | | | expression preferentially in green | |
| | | | | | tissues | |
| 36 | VC-MME301- | USP | | Resgen | non targeted expression preferentially | 9 |
| | 1QCZ | | | | in seeds | |
| 37 | pMTX461korrp | USP | FNR | Resgen | plastidic targeted expression | 10 |
| | | | | | preferentially in seeds | |
| 39 | VC-MME462- | USP | IVD | Resgen | mitochondric targeted expression | 11 |
| | 1QCZ | | | | preferentially in seeds | |
| 41 | VC-MME220- | Super | | Colic | non targeted constitutive expression | 1 |
| | 1qcz | | | | preferentially in green tissues | |
| 42 | VC-MME432- | Super | FNR | Colic | plastidic targeted constitutive | 4 |
| | 1qcz | | | | expression preferentially in green | |
| | | | | | tissues | |
| 44 | VC-MME431- | Super | IVD | Colic | mitochondric targeted constitutive | 12 |
| | 1qcz | | | | expression preferentially in green | |
| | | | | | tissues | |
| 46 | VC-MME221- | PcUbi | | Colic | non targeted constitutive expression | 2 |
| | 1qcz | | | | preferentially in green tissues | |
| 47 | pMTX447korr | PcUbi | FNR | Colic | plastidic targeted constitutive | 13 |
| | | | | | expression preferentially in green | |
| | | | | | tissues | |
| 49 | VC-MME445- | PcUbi | IVD | Colic | mitochondric targeted constitutive | 14 |
| | 1qcz | | | | expression preferentially in green | |
| | | | | | tissues | |
| 51 | VC-MME289- | USP | | Colic | non targeted expression preferentially | 15 |
| | 1qcz | | | | in seeds | |
| 52 | VC-MME464- | USP | FNR | Colic | plastidic targeted expression | 16 |
| | 1qcz | | | | preferentially in seeds | |
| 54 | VC-MME465- | USP | IVD | Colic | mitochondric targeted expression | 17 |
| | 1qcz | | | | in preferentially seeds | |
| 56 | VC-MME489- | Super | | Resgen | non targeted constitutive expression | 5 |
| | 1QCZ | | | | preferentially in green tissues | |

[0457] Construction of Binary Vectors for Non-Targeted Expression of Proteins.

“Non-targeted” expression in this context means, that no additional targeting sequence were added to the ORF to be expressed.
For non-targeted expression in preferentially green tissues the following binary vectors were used for cloning: pMTX155, VC-MME220-1 qcz, VC-MME221-1 qcz, VC-MME489-1 QCZ.
In case of VC-MME489-1 QCZ the super promoter (Ni et al., Plant Journal 7,661 (1995) sequence can be replaced by the sequence of the enhanced 35S promotor (Comai et al., Plant Mol Biol 15, 373-383 (1990) leading to similar results as shown in the table I below.

[0458] Amplification of the Targeting Sequence of the Gene FNR from Spinacia Oleracea and Construction of Vector for Plastid-Targeted Expression in Preferential Green Tissues or Preferential in Seeds.

In order to amplify the targeting sequence of the FNR gene from S. oleracea, genomic DNA was extracted from leaves of 4 weeks old S. oleracea plants (DNeasy Plant Mini Kit, Qiagen, Hilden). The gDNA was used as the template for a PCR.
To enable cloning of the transit sequence into the vector VC-MME489-1 QCZ and VC-MME301-1 QCZ an EcoRI restriction enzyme recognition sequence was added to both the forward and reverse primers, whereas for cloning in the vectors pMTX0270p, VC-MME220-1 qcz VC-MME221-1 qcz and VC-MME289-1 qcz a PmeI restriction enzyme recognition sequence was added to the forward primer and a NcoI site was added to the reverse primer.

FNR5EcoResgen
SEQ ID NO: 5
ATA GAA TTC GCA TAA ACT TAT CTT CAT AGT TGC C
FNR3EcoResgen
SEQ ID NO: 6
ATA GAA TTC AGA GGC GAT CTG GGC CCT
FNR5PmeColic
SEQ ID NO: 7
ATA GTT TAA ACG CAT AAA CTT ATC TTC ATA GTT GCC
FNR3NcoColic
SEQ ID NO: 8
ATA CCA TGG AAG AGC AAG AGG CGA TCT GGG CCC T

The resulting sequence SEQ ID NO: 29, amplified from genomic spinach DNA, comprised a 5″UTR (bp 1-165), and the coding region (bp 166-273 and 351-419). The coding sequence is interrupted by an intronic sequence from by 274 to by 350.

SEQ ID NO: 29
gcataaacttatcttcatagttgccactccaatttgctccttgaatct
cctccacccaatacataatccactcctccatcacccacttcactacta
aatcaaacttaactctgtttttctctctcctcctttcatttcttattc
ttccaatcatcgtactccgccatgaccaccgctgtcaccgccgctgtt
tctttcccctctaccaaaaccacctctctctccgcccgaagctcctcc
gtcatttcccctgacaaaatcagctacaaaaaggtgattcccaatttc
actgtgttttttattaataatttgttattttgatgatgagatgattaa
tttgggtgctgcaggttcctttgtactacaggaatgtatctgcaact
gggaaaatgggacccatcagggcccagatcgcctct

The PCR fragment derived with the primers FNR5EcoResgen and FNR3EcoResgen was digested with EcoRI and ligated in the vectors VC-MME489-1 QCZ and VC-MME301-1 QCZ, that had also been digested with EcoRI. The correct orientation of the FNR targeting sequence was tested by sequencing. The vectors generated in this ligation step were VC-MME354-1 QCZ and pMTX461 korrp, respectively.
The PCR fragment derived with the primers FNR5PmeColic and FNR3NcoColic was digested with PmeI and NcoI and ligated in the vector pMTX0270p (FIG. 6) SEQ ID NO: 9, VC-MME220-1 qcz, VC-MME221-1 qcz and VC-MME289-1 qcz that had been digested with SmaI and NcoI. The vectors generated in this ligation step were VC-MME432-1 qcz SEQ ID NO: 42 (FIG. 4) VC-MME464-1 qcz and pMTX447 korr, respectively.
For plastidic-targeted constitutive expression in preferentially green tissues an artificial promoter A(ocs)₃AmasPmas promoter (Super promotor)) (Ni et al., Plant Journal 7, 661 (1995), WO 95/14098) was used in context of the vector VC-MME354-1 QCZ for ORFs from Saccharomyces cerevisiae and in context of the vector VC-MME432-1 qcz for ORFs from Escherichia coli, resulting in each case in an “in-frame” fusion of the FNR targeting sequence with the ORFs.
For plastidic-targeted expression in preferentially seeds the USP promoter (Bäumlein et al., Mol Gen Genet. 225(3):459-67 (1991)) was used in context of either the vector pMTX461 korrp for ORFs from Saccharomyces cerevisiae or in context of the vector VC-MME464-1 qcz for ORFs from Escherichia coli, resulting in each case in an “in-frame” fusion of the FNR targeting sequence with the ORFs.
For plastidic-targeted constitutive expression in preferentially green tissues and seeds the PcUbi promoter was used in context of the vector pMTX447 korr for ORFs from Saccharomyces cerevisiae or Escherichia coli, resulting in each case in an “in-frame” fusion of the FNR targeting sequence with the ORFs.

[0459] Construction of binary vectors for mitochondric-targeted expression of proteins

Amplification of the mitochondrial targeting sequence of the gene IVD from Arabidopsis thaliana and construction of vector for mitochondrial-targeted expression in preferential green tissues or preferential in seeds.
In order to amplify the targeting sequence of the IVD gene from A. thaliana, genomic DNA was extracted from leaves of A. thaliana plants (DNeasy Plant Mini Kit, Qiagen, Hilden). The gDNA was used as the template for a PCR.
To enable cloning of the transit sequence into the vectors VC-MME489-1 QCZ and VC-MME301-1 QCZ an EcoRI restriction enzyme recognition sequence was added to both the forward and reverse primers, whereas for cloning in the vectors VC-MME220-1 qcz, VC-MME221-1 qcz and VC-MME289-1 qcz a PmeI restriction enzyme recognition sequence was added to the forward primer and a NcoI site was added to the reverse primer.

IVD5EcoResgen
SEQ ID NO: 57
ATA GAA TTC ATG CAG AGG TTT TTC TCC GC
IVD3EcoResgen
SEQ ID NO: 58
ATAg AAT TCC gAA gAA CgA gAA gAg AAA g
IVD5PmeColic
SEQ ID NO: 59
ATA GTT TAA ACA TGC AGA GGT TTT TCT CCG C
IVD3NcoColic
SEQ ID NO: 60
ATA CCA TGG AAG AGC AAA GGA GAG ACG AAG AAC GAG

The resulting sequence (SEQ ID NO: 61) amplified from genomic A. thaliana DNA with IVD5EcoResgen and IVD3EcoResgen comprised 81 bp:

SEQ ID NO: 61
atgcagaggtttttctccgccagatcgattctcggttacgccgtcaag
acgcggaggaggtctttctcttctcgttcttcg

The resulting sequence (SEQ ID NO: 62) amplified from genomic A. thaliana DNA with IVD5PmeColic and IVD3NcoColic comprised 89 bp:

SEQ ID NO: 62
atgcagaggtttttctccgccagatcgattctcggttacgccgtcaag
acgcggaggaggtctttctcttctcgttcttcgtctctcct

The PCR fragment derived with the primers IVD5EcoResgen and IVD3EcoResgen was digested with EcoRI and ligated in the vectors VC-MME489-1 QCZ and VC-MME301-1 QCZ that had also been digested with EcoRI. The correct orientation of the IVD targeting sequence was tested by sequencing. The vectors generated in this ligation step were VC-MME356-1 QCZ and VC-MME462-1 QCZ, respectively.
The PCR fragment derived with the primers IVD5PmeColic and IVD3NcoColic was digested with PmeI and NcoI and ligated in the vectors VC-MME220-1 qcz, VC-MME221-1 qcz and VC-MME289-1 qcz that had been digested with SmaI and NcoI. The vectors generated in this ligation step were VC-MME431-1 qcz, VC-MME465-1 qcz and VC-MME445-1 qcz, respectively.
For mitochondrial-targeted constitutive expression in preferentially green tissues an artificial promoter A(ocs)₃AmasPmas promoter (Super promotor) (Ni et al., Plant Journal 7,661 (1995), WO 95/14098) was used in context of the vector VC-MME356-1 QCZ for ORFs from Saccharomyces cerevisiae and in context of the vector VC-MME431-1 qcz for ORFs from Escherichia coli , resulting in each case in an “in-frame” fusion between the IVD sequence and the respective ORFs.
For mitochondrial-targeted constitutive expression in preferentially seeds the USP promoter (Bäumlein et al., Mol Gen Genet. 225(3):459-67 (1991)) was used in context of the vector VC-MME462-1 QCZ for ORFs from Saccharomyces cerevisiae and in context of the vector VC-MME465-1 qcz for ORFs from Escherichia coli , resulting in each case in an “in-frame” fusion between the IVD sequence and the respective ORFs.
For mitochondrial-targeted constitutive expression in preferentially green tissues and seeds the PcUbi promoter was used in context of the vector VC-MME445-1 qcz for ORFs from Saccharomyces cerevisiae and Escherichia coli, resulting in each case in an “in-frame” fusion between the IVD sequence and the respective ORFs.
Other useful binary vectors are known to the skilled worker; an overview of binary vectors and their use can be found in Hellens R., Mullineaux P. and Klee H., (Trends in Plant Science, 5 (10), 446 (2000)). Such vectors have to be equally equipped with appropriate promoters and targeting sequences.

[0460] Cloning of Inventive Sequences as Shown in Table I, Column 5 in the Different Expression Vectors.

For cloning the ORF of SEQ ID NO: 724, from S. cerevisiae into vectors containing the Resgen adaptor sequence the respective vector DNA was treated with the restriction enzyme NcoI. For cloning of ORFs from Saccharomyces cerevisiae into vectors containing the Colic adaptor sequence, the respective vector DNA was treated with the restriction enzymes PacI and NcoI following the standard protocol (MBI Fermentas). For cloning of ORFs from Escherichia coli the vector DNA was treated with the restriction enzymes PacI and NcoI following the standard protocol (MBI Fermentas). In all cases the reaction was stopped by inactivation at 70° C. for 20 minutes and purified over QIAquick or NucleoSpin Extract II columns following the standard protocol (Qiagen or Macherey-Nagel).
Then the PCR-product representing the amplified ORF with the respective adapter sequences and the vector DNA were treated with T4 DNA polymerase according to the standard protocol (MBI Fermentas) to produce single stranded overhangs with the parameters 1 unit T4 DNA polymerase at 37° C. for 2-10 minutes for the vector and 1-2 u T4 DNA polymerase at 15-17° C. for 10-60 minutes for the PCR product representing SEQ ID NO: 724.
The reaction was stopped by addition of high-salt buffer and purified over QIAquick or NucleoSpin Extract II columns following the standard protocol (Qiagen or Macherey-Nagel).
According to this example the skilled person is able to clone all sequences disclosed in table I, preferably column 5.

[0461] Approximately 30-60 ng of prepared vector and a defined amount of prepared amplificate were mixed and hybridized at 65° C. for 15 minutes followed by 37° C. 0.1° C./1 seconds, followed by 37° C. 10 minutes, followed by 0.1° C./1 seconds, then 4-10° C.

The ligated constructs were transformed in the same reaction vessel by addition of competent E. coli cells (strain DH5alpha) and incubation for 20 minutes at 1° C. followed by a heat shock for 90 seconds at 42° C. and cooling to 1-4° C. Then, complete medium (SOC) was added and the mixture was incubated for 45 minutes at 37° C. The entire mixture was subsequently plated onto an agar plate with 0.05 mg/ml kanamycine and incubated overnight at 37° C.

[0462] The outcome of the cloning step was verified by amplification with the aid of primers which bind upstream and downstream of the integration site, thus allowing the amplification of the insertion. The amplifications were carried as described in the protocol of Taq DNA polymerase (Gibco-BRL).

The amplification cycles were as follows: 1 cycle of 1-5 minutes at 94° C., followed by 35 cycles of in each case 15-60 seconds at 94° C., 15-60 seconds at 50-66° C. and 5-15 minutes at 72° C., followed by 1 cycle of 10 minutes at 72° C., then 4-16° C.

[0463] Several colonies were checked, but only one colony for which a PCR product of the expected size was detected was used in the following steps.

A portion of this positive colony was transferred into a reaction vessel filled with complete medium (LB) supplemented with kanamycin and incubated overnight at 37° C.
The plasmid preparation was carried out as specified in the Qiaprep or NucleoSpin Multi-96 Plus standard protocol (Qiagen or Macherey-Nagel).

[0464] Generation of Transgenic Plants which Express SEQ ID NO: 63 or any Other Sequence Disclosed in Table I, Preferably Column 5

1-5 ng of the plasmid DNA isolated was transformed by electroporation or transformation into competent cells of Agrobacterium tumefaciens, of strain GV 3101 pMP90 (Koncz and Schell, Mol. Gen. Gent. 204, 383-396, 1986). Thereafter, complete medium (YEP) was added and the mixture was transferred into a fresh reaction vessel for 3 hours at 28° C. Thereafter, all of the reaction mixture was plated onto YEP agar plates supplemented with the respective antibiotics, e.g. rifampicine (0.1 mg/ml), gentamycine (0.025 mg/ml and kanamycine (0.05 mg/ml) and incubated for 48 hours at 28° C.
The agrobacteria that contains the plasmid construct were then used for the transformation of plants.

[0465] A colony was picked from the agar plate with the aid of a pipette tip and taken up in 3 ml of liquid TB medium, which also contained suitable antibiotics as described above. The preculture was grown for 48 hours at 28° C. and 120 rpm.

400 ml of LB medium containing the same antibiotics as above were used for the main culture. The preculture was transferred into the main culture. It was grown for 18 hours at 28° C. and 120 rpm. After centrifugation at 4 000 rpm, the pellet was resuspended in infiltration medium (MS medium, 10% sucrose).

[0466] In order to grow the plants for the transformation, dishes (Piki Saat 80, green, provided with a screen bottom, 30×20×4.5 cm, from Wiesauplast, Kunststofftechnik, Germany) were half-filled with a GS 90 substrate (standard soil, Werkverband E. V., Germany). The dishes were watered overnight with 0.05% Proplant solution (Chimac-Apriphar, Belgium). Arabidopsis thaliana C24 seeds (Nottingham Arabidopsis Stock Centre, UK ; NASC Stock N906) were scattered over the dish, approximately 1 000 seeds per dish. The dishes were covered with a hood and placed in the stratification facility (8 h, 110 μmol/m²/s⁻¹, 22° C.; 16 h, dark, 6° C.). After 5 days, the dishes were placed into the short-day controlled environment chamber (8 h 130 μmol/m²/s⁻¹, 22° C.; 16 h, dark 20° C.), where they remained for approximately 10 days until the first true leaves had formed.

[0467] The seedlings were transferred into pots containing the same substrate (Teku pots, 7 cm, LC series, manufactured by Pöppelmann GmbH & Co, Germany). Five plants were pricked out into each pot. The pots were then returned into the short-day controlled environment chamber for the plant to continue growing.

After 10 days, the plants were transferred into the greenhouse cabinet (supplementary illumination, 16 h, 340 μE, 22° C.; 8 h, dark, 20° C.), where they were allowed to grow for further 17 days.

[0468] For the transformation, 6-week-old Arabidopsis plants, which had just started flowering were immersed for 10 seconds into the above-described agrobacterial suspension which had previously been treated with 10 μl Silwett L77 (Crompton S. A., Osi Specialties, Switzerland). The method in question is described in Clough and Bent, 1998 (Clough, J C and Bent, A F. 1998 Floral dip: a simplified method for Agrobacterium-mediated transformation of Arabidopsis thaliana, Plant J. 16:735-743.

The plants were subsequently placed for 18 hours into a humid chamber. Thereafter, the pots were returned to the greenhouse for the plants to continue growing. The plants remained in the greenhouse for another 10 weeks until the seeds were ready for harvesting.

[0469] Depending on the resistance marker used for the selection of the trans-formed plants the harvested seeds were planted in the greenhouse and subjected to a spray selection or else first sterilized and then grown on agar plates supplemented with the respective selection agent. Since the vector contained the bar gene as the resistance marker, plantlets were sprayed four times at an interval of 2 to 3 days with 0.02% BASTA® and transformed plants were allowed to set seeds.

The seeds of the transgenic A. thaliana plants were stored in the freezer (at −20° C.).

[0470] In the cycling drought assay repetitive stress is applied to plants without leading to desiccation. In a standard experiment soil is prepared as 1:1 (v/v) mixture of nutrient rich soil (GS90, Tantau, Wansdorf, Germany) and quarz sand. Pots (6 cm diameter) were filled with this mixture and placed into trays. Water was added to the trays to let the soil mixture take up appropriate amount of water for the sowing procedure (day 1) and subsequently seeds of transgenic A. thaliana plants and their wild-type controls were sown in pots. Then the filled tray was covered with a transparent lid and transferred into a precooled (4° C.-5° C.) and darkened growth chamber. Stratification was established for a period of 3 days in the dark at 4° C.-5° C. or, alternatively, for 4 days in the dark at 4° C. Germination of seeds and growth was initiated at a growth condition of 20° C., 60% relative humidity, 16 h photoperiod and illumination with fluorescent light at 200 μmol/m2s or, alternatively at 220 μmol/m2s. Covers were removed 7-8 days after sowing. BASTA selection was done at day 10 or day 11 (9 or 10 days after sowing) by spraying pots with plantlets from the top. In the standard experiment, a 0.07% (v/v) solution of BASTA concentrate (183 g/l glufosinate-ammonium) in tap water was sprayed once or, alternatively, a 0.02% (v/v) solution of BASTA was sprayed three times. The wild-type control plants were sprayed with tap water only (instead of spraying with BASTA dissolved in tap water) but were otherwise treated identically. Plants were individualized 13-14 days after sowing by removing the surplus of seedlings and leaving one seedling in soil. Transgenic events and wild-type control plants were evenly distributed over the chamber.

[0471] The water supply throughout the experiment was limited and plants were subjected to cycles of drought and re-watering. Watering was carried out at day 1 (before sowing), day 14 or day 15, day 21 or day 22, and, finally, day 27 or day 28. For measuring biomass production, plant fresh weight was determined one day after the final watering (day 28 or day 29) by cutting shoots and weighing them. Besides weighing, phenotypic information was added in case of plants that differ from the wild type control. Plants were in the stage prior to flowering and prior to growth of inflorescence when harvested. Significance values for the statistical significance of the biomass changes were calculated by applying the ‘student's’ t test (parameters: two-sided, unequal variance).

[0472] In a standard procedure three successive experiments were conducted. In the first experiment, one individual of each transformed line/event was tested.

[0473] In the second experiment, the events that had been determined as cycling drought tolerant or resistant in the first experiment, i.e. showed increased yield, in this case increased biomass production, in comparison to wild-type, were put through a confirmation screen according to the same experimental procedures. In this experiment, max. 10 plants of each tolerant or resistant event were grown, treated and measured as before.

[0474] In the first two experiments, cycling drought resistance or tolerance and biomass production was compared to wild-type plants.

[0475] In the third experiment up to 20 replicates of each confirmed tolerant event, i.e. those that had been scored as tolerant or resistant in the second experiment, were grown, treated and scored as before. The results thereof are summarized in table 1.

[0476] Table VIIIa: Biomass production of transgenic A. thaliana developed under cycling drought growth conditions.

Biomass production was measured by weighing plant rosettes. Biomass increase was calculated as ratio of average weight for transgenic plants compared to the average weight of wild-type control plants from the same experiment. The maximum biomass increase seen within the group of transgenic events is given for a locus with all those events showing a significance value ≦0.1 and a biomass increase ≧10% (ratio≧1.1).

TABLE VIII-A

| SeqID | Target | Locus | Biomass Increase |
|---|---|---|---|
| 63 | Plastidic | B0312 | 1.577 |
| 623 | Cytoplasmic | B3182 | 1.200 |
| 724 | Cytoplasmic | Yal043c-a | 1.570 |
| 728 | Plastidic | Ybr071w | 1.673 |
| 732 | Cytoplasmic | Ybr180w | 1.381 |
| 764 | Cytoplasmic | Ydr284c | 1.381 |
| 814 | Cytoplasmic | Ydr445c | 1.299 |
| 818 | Cytoplasmic | Yhr047c | 1.320 |
| 925 | Plastidic | Yhr190w | 1.550 |
| 1021 | Cytoplasmic | Ykl094w | 1.408 |
| 1157 | Cytoplasmic | Ykr097w | 1.698 |
| 1352 | Cytoplasmic | Ynr012w | 1.377 |
| 1423 | Plastidic | Ypl133c | 1.500 |

### EXAMPLE 2

### Engineering Arabidopsis Plants with Increased Yield, Preferably Under Condition of Transient and Repetitive Abiotic Stress by Over-Expressing Stress Related Protein Encoding Genes from Saccharomyces cereviesae or E. Coli Using Stress Inducible and Tissue-Specific Promoters

[0477] Transgenic Arabidopsis plants are created as in example 1 to express the stress related protein encoding transgenes under the control of either a tissue-specific or stress inducible promoter.
T2 generation plants are produced and treated with drought stress in two experiments The plants are deprived of water until the plant and soil were desiccated. Biomass production is determined at an equivalent degree of drought stress, tolerant plants produced more biomass than non-transgenic control plants.

### EXAMPLE 3

### Over-Expression of Stress Related Genes from Saccharomyces Cerevisiae or E. Coli Provides Tolerance of Multiple Abiotic Stresses

[0478] Plants that exhibit tolerance of one abiotic stress often exhibit tolerance of another environmental stress. This phenomenon of cross-tolerance is not understood at a mechanistic level (McKersie and Leshem, 1994). Nonetheless, it is reasonable to expect that plants exhibiting enhanced drought tolerance due to the expression of a transgene might also exhibit tolerance of cold or salt and other abiotic stresses. In support of this hypothesis, the expression of several genes are up or down-regulated by multiple abiotic stress factors including cold, salt, osmoticum, ABA, etc (e.g. Hong et al. (1992) Developmental and organ-specific expression of an ABA- and stress-induced protein in barley. Plant Mol Biol 18: 663-674; Jagendorf and Takabe (2001) Inducers of glycine-betaine synthesis in barley. Plant Physiol 127: 1827-1835); Mizoguchi et al. (1996) A gene encoding a mitogen-activated protein kinase is induced simultaneously with genes for a mitogen-activated protein kinase and an S6 ribosomal protein kinase by touch, cold, and water stress in Arabidopsis thaliana. Proc Natl Acad Sci USA 93: 765-769; Zhu (2001) Cell signaling under salt, water and cold stresses. Curr Opin Plant Biol 4: 401-406).
To determine salt tolerance, seeds of Arabidopsis thaliana are sterilized (100% bleach, 0.1% TritonX for five minutes two times and rinsed five times with ddH2O). Seeds were plated on non-selection media (½ MS, 0.6% phytagar, 0.5 g/L MES, 1% sucrose, 2 μg/ml benamyl). Seeds are allowed to germinate for approximately ten days. At the 4-5 leaf stage, transgenic plants were potted into 5.5 cm diameter pots and allowed to grow (22° C., continuous light) for approximately seven days, watering as needed. To begin the assay, two liters of 100 mM NaCl and ⅛ MS are added to the tray under the pots. To the tray containing the control plants, three liters of ⅛ MS are added. The concentrations of NaCl supplementation are increased stepwise by 50 mM every 4 days up to 200 mM. After the salt treatment with 200 mM, fresh and survival and biomass production of the plants is determined.
To determine cold tolerance, seeds of the transgenic lines are germinated and grown for approximately 10 days to the 4-5 leaf stage as above. The plants are then transferred to cold temperatures (5° C.) and can be grown through the flowering and seed set stages of development. Photosynthesis can be measured using chlorophyll fluorescence as an indicator of photosynthetic fitness and integrity of the photosystems. Survival and plant biomass production as an indicator for seed yield is determined.
Plants that have tolerance to salinity or cold have higher survival rates and biomass production including seed yield and dry matter production than susceptible plants.
To determine drought tolerance, the seedlings receive no water for a period up to 3 weeks at which time the plant and soil are desiccated and survival and biomass production of the shoots is determined. At an equivalent degree of drought stress, tolerant plants have higher survival rates and biomass production including seed yield, photosynthesis and dry matter production than susceptible plants.
In the cycling drought assay repetitive stress is applied to plants without leading to desiccation. The water supply throughout the experiment is limited and plants are subjected to cycles of drought and re-watering. Watering is carried out at day 1 (before sowing), day 14 or day 15, day 21 or day 22, and, finally, day 27 or day 28. For measuring biomass production, plant fresh weight is determined one day after the final watering (day 28 or day 29) by cutting shoots and weighing them. Besides weighing, phenotypic information is added in case of plants that differ from the wild type control. Plants are in the stage prior to flowering and prior to growth of inflorescence when harvested. Significance values for the statistical significance of the biomass changes are calculated by applying the ‘student's’ t test (parameters: two-sided, unequal variance).

### EXAMPLE 4

### Engineering Alfalfa Plants with Increased Yield, Preferably Under Condition of Transient and Repetitive Abiotic Stress by Over-Expressing Stress Related Genes from Saccharomyces Cerevisiae or E. Coli

[0479] A regenerating clone of alfalfa (Medicago sativa) is transformed using the method of (McKersie et al., 1999 Plant Physiol 119: 839-847). Regeneration and transformation of alfalfa is genotype dependent and therefore a regenerating plant is required. Methods to obtain regenerating plants have been described. For example, these can be selected from the cultivar Rangelander (Agriculture Canada) or any other commercial alfalfa variety as described by Brown D C W and A Atanassov (1985. Plant Cell Tissue Organ Culture 4: 111-112). Alternatively, the RA3 variety (University of Wisconsin) is selected for use in tissue culture (Walker et al., 1978 μm J Bot 65:654-659).
Petiole explants are cocultivated with an overnight culture of Agrobacterium tumefaciens C58C1 pMP90 (McKersie et al., 1999 Plant Physiol 119: 839-847) or LBA4404 containing a binary vector. Many different binary vector systems have been described for plant transformation (e.g. An, G. in Agrobacterium Protocols. Methods in Molecular Biology vol 44, pp 47-62, Gartland K M A and M R Davey eds. Humana Press, Totowa, N.J.). Many are based on the vector pBIN19 described by Bevan (Nucleic Acid Research. 1984. 12:8711-8721) that includes a plant gene expression cassette flanked by the left and right border sequences from the Ti plasmid of Agrobacterium tumefaciens. A plant gene expression cassette consists of at least two genes—a selection marker gene and a plant promoter regulating the transcription of the cDNA or genomic DNA of the trait gene. Various selection marker genes can be used including the Arabidopsis gene encoding a mutated acetohydroxy acid synthase (AHAS) enzyme (U.S. Pat. Nos. 57,673,666 and 6,225,105). Similarly, various promoters can be used to regulate the trait gene that provides constitutive, developmental, tissue or environmental regulation of gene transcription. In this example, the 34S promoter (GenBank Accession numbers M59930 and X16673) is used to provide constitutive expression of the trait gene.
The explants are cocultivated for 3 d in the dark on SH induction medium containing 288 mg/L Pro, 53 mg/L thioproline, 4.35 g/L K2SO4, and 100 μm acetosyringinone. The explants are washed in half-strength Murashige-Skoog medium (Murashige and Skoog, 1962) and plated on the same SH induction medium without acetosyringinone but with a suitable selection agent and suitable antibiotic to inhibit Agrobacterium growth. After several weeks, somatic embryos are transferred to BOi2Y development medium containing no growth regulators, no antibiotics, and 50 g/L sucrose. Somatic embryos are subsequently germinated on half-strength Murashige-Skoog medium. Rooted seedlings are transplanted into pots and grown in a greenhouse.
The T0 transgenic plants are propagated by node cuttings and rooted in Turface growth medium. The plants are defoliated and grown to a height of about 10 cm (approximately 2 weeks after defoliation). The plants are then subjected to drought stress in two experiments.
For the cycling drought assay repetitive stress is applied to plants without leading to desiccation. The water supply throughout the experiment is limited and plants are subjected to cycles of drought and re-watering. Watering is carried out at day 1 (before sowing), day 14 or day 15, day 21 or day 22, and, finally, day 27 or day 28. For measuring biomass production, plant fresh weight is determined one day after the final watering (day 28 or day 29) by cutting shoots and weighing them. At an equivalent degree of stress, tolerant plants have higher survival rates and biomass production including seed yield, photosynthesis and dry matter production than susceptible plants.
Tolerance of drought, salinity and cold are measured using methods as described in example 3. Plants that have tolerance to salinity or cold have higher survival rates and biomass production including seed yield, photosynthesis and dry matter production than susceptible plants.

### EXAMPLE 5a

### Engineering Ryegrass Plants with Increased Yield, Preferably Under Condition of Transient and Repetitive Abiotic Stress by Over-Expressing Stress Related Genes from Saccharomyces Cerevisiae or E. Coli

[0480] Seeds of several different ryegrass varieties may be used as explant sources for transformation, including the commercial variety Gunne available from Svalof Weibull seed company or the variety Affinity. Seeds are surface-sterilized sequentially with 1% Tween-20 for 1 minute, 100% bleach for 60 minutes, 3 rinses with 5 minutes each with de-ionized and distilled H2O, and then germinated for 3-4 days on moist, sterile filter paper in the dark. Seedlings are further sterilized for 1 minute with 1% Tween-20, 5 minutes with 75% bleach, and rinsed 3 times with ddH2O, 5 min each.
Surface-sterilized seeds are placed on the callus induction medium containing Murashige and Skoog basal salts and vitamins, 20 g/l sucrose, 150 mg/l asparagine, 500 mg/l casein hydrolysate, 3 g/l Phytagel, 10 mg/l BAP, and 5 mg/l dicamba. Plates are incubated in the dark at 25C for 4 weeks for seed germination and embryogenic callus induction.

[0481] After 4 weeks on the callus induction medium, the shoots and roots of the seedlings are trimmed away, the callus is transferred to fresh media, maintained in culture for another 4 weeks, and then transferred to MSO medium in light for 2 weeks. Several pieces of callus (11-17 weeks old) are either strained through a 10 mesh sieve and put onto callus induction medium, or cultured in 100 ml of liquid ryegrass callus induction media (same medium as for callus induction with agar) in a 250 ml flask. The flask is wrapped in foil and shaken at 175 rpm in the dark at 23 C for 1 week. Sieving the liquid culture with a 40-mesh sieve collected the cells. The fraction collected on the sieve is plated and cultured on solid ryegrass callus induction medium for 1 week in the dark at 25° C. The callus is then transferred to and cultured on MS medium containing 1% sucrose for 2 weeks.

Transformation can be accomplished with either Agrobacterium of with particle bombardment methods. An expression vector is created containing a constitutive plant promoter and the cDNA of the gene in a pUC vector. The plasmid DNA is prepared from E. coli cells using with Qiagen kit according to manufacturer's instruction. Approximately 2 g of embryogenic callus is spread in the center of a sterile filter paper in a Petri dish. An aliquot of liquid MSO with 10 g/l sucrose is added to the filter paper. Gold particles (1.0 μm in size) are coated with plasmid DNA according to method of Sanford et al., 1993 and delivered to the embryogenic callus with the following parameters: 500 μg particles and 2 μg DNA per shot, 1300 psi and a target distance of 8.5 cm from stopping plate to plate of callus and 1 shot per plate of callus.
After the bombardment, calli are transferred back to the fresh callus development medium and maintained in the dark at room temperature for a 1-week period. The callus is then transferred to growth conditions in the light at 25° C. to initiate embryo differentiation with the appropriate selection agent, e.g. 250 nM Arsenal, 5 mg/l PPT or 50 mg/L kanamycin. Shoots resistant to the selection agent appear and once rotted are transferred to soil.
Samples of the primary transgenic plants (T0) are analyzed by PCR to confirm the presence of T-DNA. These results are confirmed by Southern hybridization in which DNA is electrophoresed on a 1% agarose gel and transferred to a positively charged nylon membrane (Roche Diagnostics). The PCR DIG Probe Synthesis Kit (Roche Diagnostics) is used to prepare a digoxigenin-labelled probe by PCR, and used as recommended by the manufacturer.
Transgenic T0 ryegrass plants are propagated vegetatively by excising tillers. The transplanted tillers are maintained in the greenhouse for 2 months until well established. The shoots are defoliated and allowed to grow for 2 weeks.
For the cycling drought assay repetitive stress is applied to plants without leading to desiccation. The water supply throughout the experiment is limited and plants are subjected to cycles of drought and re-watering. For measuring biomass production, plant fresh weight is determined one day after the final watering by cutting shoots and weighing them. At an equivalent degree of stress, tolerant plants have higher survival rates and biomass production including seed yield, photosynthesis and dry matter production than susceptible plants.

### EXAMPLE 5b

[0482] Engineering Rice Plants with Increased Yield, Preferably Under Condition of Transient and Repetitive Abiotic Stress by Over-Expressing Stress Related Genes from Saccharomyces Cerevisiae or E. Coli

### Rice Transformation

[0483] The Agrobacterium containing the expression vector of the invention is used to trans-form Oryza sativa plants. Mature dry seeds of the rice japonica cultivar Nipponbare are dehusked. Sterilization is carried out by incubating for one minute in 70% ethanol, followed by 30 minutes in 0.2% HgCl₂, followed by a 6 times 15 minutes wash with sterile distilled water. The sterile seeds are then germinated on a medium containing 2,4-D (callus induction medium). After incubation in the dark for four weeks, embryogenic, scutellum-derived calli are excised and propagated on the same medium. After two weeks, the calli are multiplied or propagated by subculture on the same medium for another 2 weeks. Embryogenic callus pieces are sub-cultured on fresh medium 3 days before co-cultivation (to boost cell division activity).

Agrobacterium strain LBA4404 containing the expression vector of the invention is used for co-cultivation. Agrobacterium is inoculated on AB medium with the appropriate antibiotics and cultured for 3 days at 28° C. The bacteria are then collected and suspended in liquid co-cultivation medium to a density (OD₆₀₀) of about 1. The suspension is then transferred to a Petri dish and the calli immersed in the suspension for 15 minutes. The callus tissues are then blotted dry on a filter paper and transferred to solidified, co-cultivation medium and incubated for 3 days in the dark at 25° C. Cocultivated calli are grown on 2,4-D-containing medium for 4 weeks in the dark at 28° C. in the presence of a selection agent. During this period, rapidly growing resistant callus islands developed. After transfer of this material to a regeneration medium and incubation in the light, the embryogenic potential is released and shoots developed in the next four to five weeks. Shoots are excised from the calli and incubated for 2 to 3 weeks on an auxin-containing medium from which they are transferred to soil. Hardened shoots are grown under high humidity and short days in a greenhouse.
Approximately 35 independent T0 rice transformants are generated for one construct. The primary transformants are transferred from a tissue culture chamber to a greenhouse. After a quantitative PCR analysis to verify copy number of the T-DNA insert, only single copy transgenic plants that exhibit tolerance to the selection agent are kept for harvest of T1 seed. Seeds are then harvested three to five months after transplanting. The method yielded single locus transformants at a rate of over 50% (Aldemita and Hodges1996, Chan et al. 1993, Hiei et al. 1994).
For the cycling drought assay repetitive stress is applied to plants without leading to desiccation. The water supply throughout the experiment is limited and plants are subjected to cycles of drought and re-watering. For measuring biomass production, plant fresh weight is determined one day after the final watering by cutting shoots and weighing them.

### EXAMPLE 6

### Engineering Soybean Plants with Increased Yield, Preferably Under Condition of Transient and Repetitive Abiotic Stress by Over-Expressing Stress Related Genes from Saccharomyces Cerevisiae or E. Coli

[0484] Soybean is transformed according to the following modification of the method described in the Texas A&M patent U.S. Pat. No. 5,164,310. Several commercial soybean varieties are amenable to transformation by this method. The cultivar Jack (available from the Illinois Seed Foundation) is a commonly used for transformation. Seeds are sterilized by immersion in 70% (v/v) ethanol for 6 min and in 25% commercial bleach (NaOCl) supplemented with 0.1% (v/v) Tween for 20 min, followed by rinsing 4 times with sterile double distilled water. Seven-day seedlings are propagated by removing the radicle, hypocotyl and one cotyledon from each seedling. Then, the epicotyl with one cotyledon is transferred to fresh germination media in petri dishes and incubated at 25° C. under a 16-hr photoperiod (approx. 100 μE-m⁻²s⁻¹) for three weeks. Axillary nodes (approx. 4 mm in length) were cut from 3-4 week-old plants. Axillary nodes are excised and incubated in Agrobacterium LBA4404 culture.
Many different binary vector systems have been described for plant transformation (e.g. An, G. in Agrobacterium Protocols. Methods in Molecular Biology vol 44, pp 47-62, Gartland K M A and M R Davey eds. Humana Press, Totowa, N.J.). Many are based on the vector pBIN19 described by Bevan (Nucleic Acid Research. 1984. 12:8711-8721) that includes a plant gene expression cassette flanked by the left and right border sequences from the Ti plasmid of Agrobacterium tumefaciens. A plant gene expression cassette consists of at least two genes—a selection marker gene and a plant promoter regulating the transcription of the cDNA or genomic DNA of the trait gene. Various selection marker genes can be used including the Arabidopsis gene encoding a mutated acetohydroxy acid synthase (AHAS) enzyme (U.S. Pat. Nos. 57,673,666 and 6225105). Similarly, various promoters can be used to regulate the trait gene to provide constitutive, developmental, tissue or environmental regulation of gene transcription. In this example, the 34S promoter (GenBank Accession numbers M59930 and X16673) can be used to provide constitutive expression of the trait gene.
After the co-cultivation treatment, the explants are washed and transferred to selection media supplemented with 500 mg/L timentin. Shoots are excised and placed on a shoot elongation medium. Shoots longer than 1 cm are placed on rooting medium for two to four weeks prior to transplanting to soil.
The primary transgenic plants (T0) are analyzed by PCR to confirm the presence of T-DNA. These results are confirmed by Southern hybridization in which DNA is electrophoresed on a 1% agarose gel and transferred to a positively charged nylon membrane (Roche Diagnostics). The PCR DIG Probe Synthesis Kit (Roche Diagnostics) is used to prepare a digoxigenin-labelled probe by PCR, and used as recommended by the manufacturer.
Tolerant plants have higher seed yields.
Tolerance of cycling drought, drought, salinity and cold are measured using methods as described in example 3. Tolerant plants have higher survival rates and biomass production including seed yield, photosynthesis and dry matter production than susceptible plants.

### EXAMPLE 7

[0485] Engineering Rapeseed/Canola Plants with Increased Yield, Preferably Under Condition of Transient and Repetitive Abiotic Stress by Over-Expressing Stress Related Genes from Saccharomyces Cerevisiae or E. Coli

Cotyledonary petioles and hypocotyls of 5-6 day-old young seedlings are used as explants for tissue culture and transformed according to Babic et al. (1998, Plant Cell Rep 17: 183-188). The commercial cultivar Westar (Agriculture Canada) is the standard variety used for transformation, but other varieties can be used.
Agrobacterium tumefaciens LBA4404 containing a binary vector can be used for canola transformation. Many different binary vector systems have been described for plant transformation (e.g. An, G. in Agrobacterium Protocols. Methods in Molecular Biology vol 44, pp 47-62, Gartland K M A and M R Davey eds. Humana Press, Totowa, N.J.). Many are based on the vector pBIN19 described by Bevan (Nucleic Acid Research. 1984. 12:8711-8721) that includes a plant gene expression cassette flanked by the left and right border sequences from the Ti plasmid of Agrobacterium tumefaciens. A plant gene expression cassette consists of at least two genes—a selection marker gene and a plant promoter regulating the transcription of the cDNA or genomic DNA of the trait gene. Various selection marker genes can be used including the Arabidopsis gene encoding a mutated acetohydroxy acid synthase (AHAS) enzyme (U.S. Pat. Nos. 57,673,666 and 6,225,105). Similarly, various promoters can be used to regulate the trait gene to provide constitutive, developmental, tissue or environmental regulation of gene transcription. In this example, the 34S promoter (GenBank Accession numbers M59930 and X16673) can be used to provide constitutive expression of the trait gene.
Canola seeds are surface-sterilized in 70% ethanol for 2 min., and then in 30% Clorox with a drop of Tween-20 for 10 min, followed by three rinses with sterilized distilled water. Seeds are then germinated in vitro 5 days on half strength MS medium without hormones, 1% sucrose, 0.7% Phytagar at 23° C., 16 hr. light. The cotyledon petiole explants with the cotyledon attached are excised from the in vitro seedlings, and inoculated with Agrobacterium by dipping the cut end of the petiole explant into the bacterial suspension. The explants are then cultured for 2 days on MSBAP-3 medium containing 3 mg/l BAP, 3% sucrose, 0.7% Phytagar at 23° C., 16 hr light. After two days of co-cultivation with Agrobacterium, the petiole explants are transferred to MSBAP-3 medium containing 3 mg/l BAP, cefotaxime, carbenicillin, or timentin (300 mg/l) for 7 days, and then cultured on MSBAP-3 medium with cefotaxime, carbenicillin, or timentin and selection agent until shoot regeneration. When the shoots were 5-10 mm in length, they are cut and transferred to shoot elongation medium (MSBAP-0.5, containing 0.5 mg/l BAP). Shoots of about 2 cm in length are transferred to the rooting medium (MS0) for root induction.
Samples of the primary transgenic plants (T0) are analyzed by PCR to confirm the presence of T-DNA. These results are confirmed by Southern hybridization in which DNA is electrophoresed on a 1% agarose gel and transferred to a positively charged nylon membrane (Roche Diagnostics). The PCR DIG Probe Synthesis Kit (Roche Diagnostics) is used to prepare a digoxigenin-labelled probe by PCR, and used as recommended by the manufacturer.
Tolerance of cycling drought, drought, salinity and cold are measured using methods as described in example 3. Tolerant plants have higher survival rates and biomass production including seed yield, photosynthesis and dry matter production than susceptible plants.

### EXAMPLE 8

### Engineering Corn Plants with Increased Yield, Preferably Under Condition of Transient and Repetitive Abiotic Stress by Over-Expressing Stress Related Genes from Saccharomyces Cerevisiae or E. Coli

[0486] Transformation of maize (Zea Mays L.) is performed with a modification of the method described by Ishida et al. (1996. Nature Biotech 14745-50). Transformation is genotype-dependent in corn and only specific genotypes are amenable to transformation and regeneration. The inbred line A188 (University of Minnesota) or hybrids with A188 as a parent are good sources of donor material for transformation (Fromm et al. 1990 Biotech 8:833-839), but other genotypes can be used successfully as well. Ears are harvested from corn plants at approximately 11 days after pollination (DAP) when the length of immature embryos is about 1 to 1.2 mm. Immature embryos are co-cultivated with Agrobacterium tumefaciens that carry “super binary” vectors and transgenic plants are recovered through organogenesis. The super binary vector system of Japan Tobacco is described in WO patents WO94/00977 and WO95/06722. Vectors were constructed as described. Various selection marker genes can be used including the maize gene encoding a mutated acetohydroxy acid synthase (AHAS) enzyme (U.S. Pat. No. 6,025,541). Similarly, various promoters can be used to regulate the trait gene to provide constitutive, developmental, tissue or environmental regulation of gene transcription. In this example, the 34S promoter (GenBank Accession numbers M59930 and X16673) was used to provide constitutive expression of the trait gene.
Excised embryos are grown on callus induction medium, then maize regeneration medium, containing imidazolinone as a selection agent. The Petri plates are incubated in the light at 25° C. for 2-3 weeks, or until shoots develop. The green shoots are transferred from each embryo to maize rooting medium and incubated at 25° C. for 2-3 weeks, until roots develop. The rooted shoots are transplanted to soil in the greenhouse. T1 seeds are produced from plants that exhibit tolerance to the imidazolinone herbicides and which are PCR positive for the transgenes.
The T1 transgenic plants are then evaluated for their improved stress tolerance. For the cycling drought assay repetitive stress is applied to plants without leading to desiccation. The water supply throughout the experiment is limited and plants are subjected to cycles of drought and re-watering. For measuring biomass production, plant fresh weight is determined one day after the final watering by cutting shoots and weighing them.
The T1 generation of single locus insertions of the T-DNA will segregate for the trans-gene in a 3:1 ratio. Those progeny containing one or two copies of the transgene are tolerant of the imidazolinone herbicide, and exhibit greater tolerance of drought stress than those progeny lacking the transgenes. Tolerant plants have higher survival rates and biomass production including seed yield, photosynthesis and dry matter production than susceptible plants. Homozygous T2 plants exhibited similar phenotypes. Hybrid plants (F1 progeny) of homozygous transgenic plants and non-transgenic plants also exhibited increased environmental stress tolerance.
Tolerance of drought, salinity and cold are measured using methods as described in the previous example 3. Tolerant plants have higher survival rates and biomass production including seed yield, photosynthesis and dry matter production than susceptible plants.

### EXAMPLE 9

### Engineering Wheat Plants with Increased Yield, Preferably Under Condition of Transient and Repetitive Abiotic Stress by Over-Expressing Stress Related Genes from Saccharomyces Cerevisiae or E. Coli

[0487] Transformation of wheat is performed with the method described by Ishida et al. (1996 Nature Biotech. 14745-50). The cultivar Bobwhite (available from CYMMIT, Mexico) is commonly used in transformation. Immature embryos are co-cultivated with Agrobacterium tumefaciens that carry “super binary” vectors, and transgenic plants are recovered through organogenesis. The super binary vector system of Japan Tobacco is described in WO patents WO94/00977 and WO95/06722. Vectors were constructed as described. Various selection marker genes can be used including the maize gene encoding a mutated acetohydroxy acid synthase (AHAS) enzyme (U.S. Pat. No. 6,025,541). Similarly, various promoters can be used to regulate the trait gene to provide constitutive, developmental, tissue or environmental regulation of gene transcription. In this example, the 34S promoter (GenBank Accession numbers M59930 and X16673) was used to provide constitutive expression of the trait gene.
After incubation with Agrobacterium, the embryos are grown on callus induction medium, then regeneration medium, containing imidazolinone as a selection agent. The Petri plates are incubated in the light at 25° C. for 2-3 weeks, or until shoots develop. The green shoots are transferred from each embryo to rooting medium and incubated at 25° C. for 2-3 weeks, until roots develop. The rooted shoots are transplanted to soil in the greenhouse. T1 seeds are produced from plants that exhibit tolerance to the imidazolinone herbicides and which are PCR positive for the transgenes.
The T1 transgenic plants are then evaluated for their improved stress tolerance according to the method described in the previous example 3. The T1 generation of single locus insertions of the T-DNA will segregate for the transgene in a 3:1 ratio. Those progeny containing one or two copies of the transgene are tolerant of the imidazolinone herbicide, and exhibit greater tolerance of drought stress than those progeny lacking the transgenes. Tolerant plants have higher survival rates and biomass production including seed yield, photosynthesis and dry matter production than susceptible plants. Homozygous T2 plants exhibited similar phenotypes. Tolerance of salinity and cold are measured using methods as described in the previous examples Tolerant plants have higher survival rates and biomass production including seed yield, photosynthesis and dry matter production than susceptible plants.

### EXAMPLE 10

### Identification of Identical and Heterologous Genes

[0488] Gene sequences can be used to identify identical or heterologous genes from cDNA or genomic libraries. Identical genes (e.g. full-length cDNA clones) can be isolated via nucleic acid hybridization using for example cDNA libraries. Depending on the abundance of the gene of interest, 100,000 up to 1,000,000 recombinant bacteriophages are plated and transferred to nylon membranes. After denaturation with alkali, DNA is immobilized on the membrane by e.g. UV cross linking. Hybridization is carried out at high stringency conditions. In aqueous solution, hybridization and washing is performed at an ionic strength of 1 M NaCl and a temperature of 68° C. Hybridization probes are generated by e.g. radioactive (³²P) nick transcription labeling (High Prime, Roche, Mannheim, Germany). Signals are detected by autoradiography.
Partially identical or heterologous genes that are related but not identical can be identified in a manner analogous to the above-described procedure using low stringency hybridization and washing conditions. For aqueous hybridization, the ionic strength is normally kept at 1 M NaCl while the temperature is progressively lowered from 68 to 42° C.
Isolation of gene sequences with homology (or sequence identity/similarity) only in a distinct domain of (for example 10-20 amino acids) can be carried out by using synthetic radio labeled oligonucleotide probes. Radiolabeled oligonucleotides are prepared by phosphorylation of the 5-prime end of two complementary oligonucleotides with T4 polynucleotide kinase. The complementary oligonucleotides are annealed and ligated to form concatemers. The double stranded concatemers are than radiolabeled by, for example, nick transcription. Hybridization is normally performed at low stringency conditions using high oligonucleotide concentrations.
Oligonucleotide hybridization solution:

### 6×SSC

[0489] 0.01 M sodium phosphate

### 1 mM EDTA (pH 8)

### 0.5% SDS

[0490] 100 μg/ml denatured salmon sperm DNA
0.1% nonfat dried milk
During hybridization, temperature is lowered stepwise to 5-10° C. below the estimated oligonucleotide Tₘ or down to room temperature followed by washing steps and autoradiography. Washing is performed with low stringency such as 3 washing steps using 4×SSC. Further details are described by Sambrook, J. et al., 1989, “Molecular Cloning: A Laboratory Manual,” Cold Spring Harbor Laboratory Press or Ausubel, F. M. et al., 1994, “Current Protocols in Molecular Biology,” John Wiley & Sons.

### EXAMPLE 11

### Identification of Identical Genes by Screening Expression Libraries with Antibodies

[0491] c-DNA clones can be used to produce recombinant polypeptide for example in E. coli (e.g. Qiagen QIAexpress pQE system). Recombinant polypeptides are then normally affinity purified via Ni-NTA affinity chromatography (Qiagen). Recombinant polypeptides are then used to produce specific antibodies for example by using standard techniques for rabbit immunization. Antibodies are affinity purified using a Ni-NTA column saturated with the recombinant antigen as described by Gu et al., 1994, BioTechniques 17:257-262. The antibody can than be used to screen expression cDNA libraries to identify identical or heterologous genes via an immunological screening (Sambrook, J. et al., 1989, “Molecular Cloning: A Laboratory Manual,” Cold Spring Harbor Laboratory Press or Ausubel, F. M. et al., 1994, “Current Protocols in Molecular Biology”, John Wiley & Sons).

### EXAMPLE 12

### In Vivo Mutagenesis

[0492] In vivo mutagenesis of microorganisms can be performed by passage of plasmid (or other vector) DNA through E. coli or other microorganisms (e.g. Bacillus spp. or yeasts such as Saccharomyces cerevisiae) which are impaired in their capabilities to maintain the integrity of their genetic information. Typical mutator strains have mutations in the genes for the DNA repair system (e.g., mutHLS, mutD, mutT, etc.; for reference, see Rupp, W. D., 1996, DNA repair mechanisms, in: Escherichia coli and Salmonella, p. 2277-2294, ASM: Washington.) Such strains are well known to those skilled in the art. The use of such strains is illustrated, for example, in Greener, A. and Callahan, M., 1994, Strategies 7: 32-34. Transfer of mutated DNA molecules into plants is preferably done after selection and testing in microorganisms. Transgenic plants are generated according to various examples within the exemplification of this document.

### EXAMPLE 13

### Engineering Arabidopsis Plants with Increased Yield, Preferably Under Condition of Transient and Repetitive Abiotic Stress by Over-Expressing Yield and Stress Related Protein Encoding Genes for Example from Brassica napus, Glycine max, Zea mays or Oryza sativa Using Stress-Inducible and Tissue-Specific Promoters

[0493] Transgenic Arabidopsis plants over-expressing stress related protein encoding genes from Brassica napus, Glycine max, Zea mays and Oryza sativa for example are created as described in example 1 to express the stress related protein encoding trans-genes under the control of either a tissue-specific or stress-inducible promoter. Stress inducible expression is achieved using promoters selected from those listed above in Table VI.
T2 generation plants are produced and treated with stress. For the cycling drought assay repetitive stress is applied to plants without leading to desiccation. The water supply throughout the experiment is limited and plants are subjected to cycles of drought and re-watering. For measuring biomass production, plant fresh weight is determined one day after the final watering by cutting shoots and weighing them. At an equivalent degree of drought stress, tolerant plants are able to resume normal growth and produced more biomass than non-transgenic control plants.
Tolerant plants have higher survival rates and biomass production including seed yield, photosynthesis and dry matter production than susceptible plants.

### EXAMPLE 14

### Over-Expression of Yield and Stress Related Genes for Example from Brassica napus, Glycine max, Zea mays or Oryza sativa for Example Provides Tolerance of Multiple Abiotic Stresses

[0494] Plants that exhibit tolerance of one abiotic stress often exhibit tolerance of another environmental stress. This phenomenon of cross-tolerance is not understood at a mechanistic level (McKersie and Leshem, 1994). Nonetheless, it is reasonable to expect that plants exhibiting enhanced cycling drought tolerance due to the expression of a trans-gene might also exhibit tolerance of drought, cold, salt, and other abiotic stresses. In support of this hypothesis, the expression of several genes are up or down-regulated by multiple abiotic stress factors including cold, salt, osmoticum, ABA, etc (e.g. Hong et al. (1992) Developmental and organ-specific expression of an ABA- and stress-induced protein in barley. Plant Mol Biol 18: 663-674; Jagendorf and Takabe (2001) Inducers of glycinebetaine synthesis in barley. Plant Physiol 127: 1827-1835); Mizoguchi et al. (1996) A gene encoding a mitogen-activated protein kinase is induced simultaneously with genes for a mitogen-activated protein kinase and an S6 ribosomal protein kinase by touch, cold, and water stress in Arabidopsis thaliana. Proc Natl Acad Sci USA 93: 765-769; Zhu (2001) Cell signaling under salt, water and cold stresses. Curr Opin Plant Biol 4: 401-406).
Transgenic Arabidopsis plants over-expressing stress related protein encoding genes from Brassica napus, Glycine max, Zea mays and Oryza sativa for example are created as described in example 1 and tested for tolerance stress.
For the cycling drought assay repetitive stress is applied to plants without leading to desiccation. The water supply throughout the experiment is limited and plants are subjected to cycles of drought and re-watering. For measuring biomass production, plant fresh weight is determined one day after the final watering by cutting shoots and weighing them.
To determine salt tolerance, seeds of Arabidopsis thaliana are sterilized (incubated in 100% bleach, 0.1% TritonX100 for five minutes (twice) and rinsed five times with ddH2O). Seeds are plated on non-selective medium (½ MS, 0.6% phytagar, 0.5 g/L MES, 1% sucrose, 2 μg/ml benamyl). Seeds are allowed to germinate for approximately ten days. At the 4-5 leaf stage, transgenic plants are potted into 5.5 cm diameter pots and allowed to grow (22° C., continuous light) for approximately seven days, watering as needed. To begin the assay, two liters of 100 mM NaCl and ⅛ MS are added to the tray under the pots. To the tray containing the control plants, three liters of ⅛ MS is added. The concentrations of NaCl supplementation are increased stepwise by 50 mM every 4 days up to 200 mM. After the salt treatment with 200 mM, fresh and dry weights of the plants as well as seed yields are determined. Transgenic plants overexpression stress related protein encoding genes from Brassica napus, Glycine max, Zea mays and Oryza sativa for example show higher fresh and dry weights and more seed yield in comparison to wildtype or mock transformed plants.
To determine cold tolerance, seeds of the transgenic and cold lines are germinated and grown for approximately 10 days to the 4-5 leaf stage as above. The plants are then transferred to cold temperatures (5° C.). Photosynthesis can be measured using chlorophyll fluorescence as an indicator of photosynthetic fitness and integrity of the photosystems. Seed yield and plant dry weight are measured as an indictor of plant biomass production.
It is found that the over-expression of stress related genes from Brassica napus, Glycine max, Zea mays or Oryza sativa for example provided tolerance to cycling drought, salt and cold as well as drought. Tolerant plants have higher survival rates and biomass production including seed yield, photosynthesis and dry matter production than susceptible plants.

### EXAMPLE 15

### Engineering Alfalfa Plants with Increased Yield, Preferably Under Condition of Transient and Repetitive Abiotic Stress by Over-Expressing Yield Stress Related Genes for Example from Brassica napus, Glycine max, Zea Mays or Oryza sativa for Example

[0495] A regenerating clone of alfalfa (Medicago sativa) is transformed using the method of McKersie et al., 1999 (Plant Physiol 119: 839-847). Regeneration and transformation of alfalfa is genotype dependent and therefore a regenerating plant is required. Methods to obtain regenerating plants have been described. For example, these can be selected from the cultivar Rangelander (Agriculture Canada) or any other commercial alfalfa variety as described by Brown and Atanassov (1985. Plant Cell Tissue Organ Culture 4: 111-112). Alternatively, the RA3 variety (University of Wisconsin) has been selected for use in tissue culture (Walker et al., 1978 μm J Bot 65:654-659).
Petiole explants are cocultivated with an overnight culture of Agrobacterium tumefaciens C58C1 pMP90 (McKersie et al., 1999 Plant Physiol 119: 839-847) or LBA4404 containing a binary vector. Many different binary vector systems have been described for plant transformation (e.g. An, G. in Agrobacterium Protocols. Methods in Molecular Biology vol 44, pp 47-62, Gartland K M A and M R Davey eds. Humana Press, Totowa, N.J.). Many are based on the vector pBIN19 described by Bevan (Nucleic Acid Research. 1984. 12:8711-8721) that includes a plant gene expression cassette flanked by the left and right border sequences from the Ti plasmid of Agrobacterium tumefaciens. A plant gene expression cassette consists of at least two genes—a selection marker gene and a plant promoter regulating the transcription of the cDNA or genomic DNA of the trait gene. Various selection marker genes can be used including the Arabidopsis gene encoding a mutated acetohydroxy acid synthase (AHAS) enzyme (U.S. Pat. Nos. 57,673,666 and 6225105). Similarly, various promoters can be used to regulate the trait gene that provides constitutive, developmental, tissue or environmental regulation of gene transcription. In this example, the 34S promoter (Gen Bank Accession numbers M59930 and X16673) was used to provide constitutive expression of the trait gene.
The explants are cocultivated for 3 d in the dark on SH induction medium containing 288 mg/L Pro, 53 mg/L thioproline, 4.35 g/L K2SO4, and 100 μm acetosyringinone. The explants were washed in half-strength Murashige-Skoog medium (Murashige and Skoog, 1962) and plated on the same SH induction medium without acetosyringinone but with a suitable selection agent and suitable antibiotic to inhibit Agrobacterium growth. After several weeks, somatic embryos are transferred to BOi2Y development medium containing no growth regulators, no antibiotics, and 50 g/L sucrose. Somatic embryos are subsequently germinated on half-strength Murashige-Skoog medium. Rooted seedlings are transplanted into pots and grown in a greenhouse.
The T0 transgenic plants are propagated by node cuttings and rooted in Turface growth medium. The plants are defoliated and grown to a height of about 10 cm (approximately 2 weeks after defoliation). The plants are then subjected to drought stress in two experiments.
For the cycling drought assay repetitive stress is applied to plants without leading to desiccation. The water supply throughout the experiment is limited and plants are subjected to cycles of drought and re-watering. For measuring biomass production, plant fresh weight is determined one day after the final watering by cutting shoots and weighing them. At an equivalent degree of drought stress, the tolerant transgenic plants are able to grow normally whereas susceptible wild type plants have died or suffer significant injury resulting in less dry matter.
Tolerance of salinity and cold is measured using methods as described in example 3. It is found that alfalfa plants over-expressing stress related genes from Brassica napus, Glycine max, Zea mays or Oryza sativa for example are more resistant to salinity and cold stress than non-transgenic control plants. Tolerant plants have higher survival rates and biomass production including seed yield, photosynthesis and dry matter production than susceptible plants.

### EXAMPLE 16a

### Engineering Ryegrass Plants with Increased Yield, Preferably Under Condition of Transient and Repetitive Abiotic Stress by Over-Expressing Yield and Stress Related Genes for Example from Brassica napus, Glycine max, Zea mays or Oryza sativa for Example

[0496] Seeds of several different ryegrass varieties may be used as explant sources for transformation, including the commercial variety Gunne available from Svalof Weibull seed company or the variety Affinity. Seeds are surface-sterilized sequentially with 1% Tween-20 for 1 minute, 100% bleach for 60 minutes, 3 rinses with 5 minutes each with de-ionized and distilled H2O, and then germinated for 3-4 days on moist, sterile filter paper in the dark. Seedlings are further sterilized for 1 minute with 1% Tween-20, 5 minutes with 75% bleach, and rinsed 3 times with ddH2O, 5 min each.
Surface-sterilized seeds are placed on the callus induction medium containing Murashige and Skoog basal salts and vitamins, 20 g/l sucrose, 150 mg/l asparagine, 500 mg/l casein hydrolysate, 3 g/l Phytagel, 10 mg/l BAP, and 5 mg/l dicamba. Plates are incubated in the dark at 25C for 4 weeks for seed germination and embryogenic callus induction.
After 4 weeks on the callus induction medium, the shoots and roots of the seedlings are trimmed away, the callus is transferred to fresh media, maintained in culture for another 4 weeks, and then transferred to MSO medium in light for 2 weeks. Several pieces of callus (11-17 weeks old) are either strained through a 10 mesh sieve and put onto callus induction medium, or cultured in 100 ml of liquid ryegrass callus induction media (same medium as for callus induction with agar) in a 250 ml flask. The flask is wrapped in foil and shaken at 175 rpm in the dark at 23° C. for 1 week. Sieving the liquid culture with a 40-mesh sieve collect the cells. The fraction collected on the sieve is plated and cultured on solid ryegrass callus induction medium for 1 week in the dark at 25C. The callus is then transferred to and cultured on MS medium containing 1% sucrose for 2 weeks.
Transformation can be accomplished with either Agrobacterium of with particle bombardment methods. An expression vector is created containing a constitutive plant promoter and the cDNA of the gene in a pUC vector. The plasmid DNA is prepared from E. coli cells using with Qiagen kit according to manufacturer's instruction. Approximately 2 g of embryogenic callus is spread in the center of a sterile filter paper in a Petri dish. An aliquot of liquid MSO with 10 g/l sucrose is added to the filter paper. Gold particles (1.0 μm in size) are coated with plasmid DNA according to method of Sanford et al., 1993 and delivered to the embryogenic callus with the following parameters: 500 μg particles and 2 μg DNA per shot, 1300 psi and a target distance of 8.5 cm from stopping plate to plate of callus and 1 shot per plate of callus.
After the bombardment, calli are transferred back to the fresh callus development medium and maintained in the dark at room temperature for a 1-week period. The callus is then transferred to growth conditions in the light at 25° C. to initiate embryo differentiation with the appropriate selection agent, e.g. 250 nM Arsenal, 5 mg/l PPT or 50 mg/L kanamycin. Shoots resistant to the selection agent appeared and once rooted are transferred to soil.
Samples of the primary transgenic plants (T0) are analyzed by PCR to confirm the presence of T-DNA. These results are confirmed by Southern hybridization in which DNA is electrophoresed on a 1% agarose gel and transferred to a positively charged nylon membrane (Roche Diagnostics). The PCR DIG Probe Synthesis Kit (Roche Diagnostics) is used to prepare a digoxigenin-labelled probe by PCR, and used as recommended by the manufacturer.
Transgenic T0 ryegrass plants are propagated vegetatively by excising tillers. The transplanted tillers are maintained in the greenhouse for 2 months until well established. The shoots are defoliated and allowed to grow for 2 weeks.
For the cycling drought assay repetitive stress is applied to plants without leading to desiccation. The water supply throughout the experiment is limited and plants are subjected to cycles of drought and re-watering. For measuring biomass production, plant fresh weight is determined one day after the final watering by cutting shoots and weighing them. At an equivalent degree of drought stress, tolerant plants are able to resume normal growth whereas susceptible plants have died or suffer significant injury resulting in shorter leaves and less dry matter.
A second experiment imposing drought stress on the transgenic plants was by treatment with a solution of PEG as described in the previous examples. Tolerance of salinity and cold were measured using methods as described in example 3. It is found that ryegrass over-expressing stress related genes from Brassica napus, Glycine max, Zea mays or Oryza sativa for example are more resistant to salinity and cold stress that non-transgenic control plants. Tolerant plants have higher survival rates and biomass production including seed yield, photosynthesis and dry matter production than susceptible plants.

### EXAMPLE 16b

### Engineering Rice Plants with Increased Yield, Preferably Under Condition of Transient and Repetitive Abiotic Stress by Over-Expressing Yield and Stress Related Genes for Example from Brassica napus, Glycine max, Zea Mays or Oryza sativa for Example

### Rice Transformation

[0497] The Agrobacterium containing the expression vector of the invention is used to trans-form Oryza sativa plants. Mature dry seeds of the rice japonica cultivar Nipponbare are dehusked. Sterilization is carried out by incubating for one minute in 70% ethanol, followed by 30 minutes in 0.2% HgCl2, followed by a 6 times 15 minutes wash with sterile distilled water. The sterile seeds are then germinated on a medium containing 2,4-D (callus induction medium). After incubation in the dark for four weeks, embryogenic, scutellum-derived calli are excised and propagated on the same medium. After two weeks, the calli are multiplied or propagated by subculture on the same medium for another 2 weeks. Embryogenic callus pieces are sub-cultured on fresh medium 3 days before co-cultivation (to boost cell division activity).
Agrobacterium strain LBA4404 containing the expression vector of the invention is used for co-cultivation. Agrobacterium is inoculated on AB medium with the appropriate antibiotics and cultured for 3 days at 28° C. The bacteria are then collected and suspended in liquid co-cultivation medium to a density (OD600) of about 1. The suspension is then transferred to a Petri dish and the calli immersed in the suspension for 15 minutes. The callus tissues are then blotted dry on a filter paper and transferred to solidified, co-cultivation medium and incubated for 3 days in the dark at 25° C. Cocultivated calli are grown on 2,4-D-containing medium for 4 weeks in the dark at 28° C. in the presence of a selection agent. During this period, rapidly growing resistant callus islands developed. After transfer of this material to a regeneration medium and incubation in the light, the embryogenic potential is released and shoots developed in the next four to five weeks. Shoots are excised from the calli and incubated for 2 to 3 weeks on an auxin-containing medium from which they are transferred to soil. Hardened shoots are grown under high humidity and short days in a greenhouse.
Approximately 35 independent T0 rice transformants are generated for one construct. The primary transformants are transferred from a tissue culture chamber to a greenhouse. After a quantitative PCR analysis to verify copy number of the T-DNA insert, only single copy transgenic plants that exhibit tolerance to the selection agent are kept for harvest of T1 seed. Seeds are then harvested three to five months after transplanting. The method yielded single locus transformants at a rate of over 50% (Aldemita and Hodges1996, Chan et al. 1993, Hiei et al. 1994).
For the cycling drought assay repetitive stress is applied to plants without leading to desiccation. The water supply throughout the experiment is limited and plants are subjected to cycles of drought and re-watering. For measuring biomass production, plant fresh weight is determined one day after the final watering by cutting shoots and weighing them. At an equivalent degree of drought stress, tolerant plants are able to resume normal growth whereas susceptible plants have died or suffer significant injury resulting in shorter leaves and less dry matter.

### EXAMPLE 17

### Engineering Soybean Plants with Increased Yield, Preferably Under Condition of Transient and Repetitive Abiotic Stress by Over-Expressing Yield and Stress Related Genes for Example from Brassica napus, Glycine max, Zea Mays or Oryza sativa for Example

[0498] Soybean is transformed according to the following modification of the method described in the Texas A&M patent U.S. Pat. No. 5,164,310. Several commercial soybean varieties are amenable to transformation by this method. The cultivar Jack (available from the Illinois Seed Foundation) is a commonly used for transformation. Seeds are sterilized by immersion in 70% (v/v) ethanol for 6 min and in 25% commercial bleach (NaOCl) supplemented with 0.1% (v/v) Tween for 20 min, followed by rinsing 4 times with sterile double distilled water. Seven-day old seedlings are propagated by removing the radicle, hypocotyl and one cotyledon from each seedling. Then, the epicotyl with one cotyledon is transferred to fresh germination media in petri dishes and incubated at 25° C. under a 16-hr photoperiod (approx. 100 μE/(m⁻²s⁻¹) for three weeks. Axillary nodes (approx. 4 mm in length) are cut from 3-4 week-old plants. Axillary nodes are excised and incubated in Agrobacterium LBA4404 culture.
Many different binary vector systems have been described for plant transformation (e.g. An, G. in Agrobacterium Protocols. Methods in Molecular Biology vol 44, pp 47-62, Gartland K M A and M R Davey eds. Humana Press, Totowa, N.J.). Many are based on the vector pBIN19 described by Bevan (Nucleic Acid Research. 1984. 12:8711-8721) that includes a plant gene expression cassette flanked by the left and right border sequences from the Ti plasmid of Agrobacterium tumefaciens. A plant gene expression cassette consists of at least two genes—a selection marker gene and a plant promoter regulating the transcription of the cDNA or genomic DNA of the trait gene. Various selection marker genes can be used including the Arabidopsis gene encoding a mutated acetohydroxy acid synthase (AHAS) enzyme (U.S. Pat. Nos. 57,673,666 and 6225105). Similarly, various promoters can be used to regulate the trait gene to provide constitutive, developmental, tissue or environmental regulation of gene transcription. In this example, the 34S promoter (GenBank Accession numbers M59930 and X16673) is used to provide constitutive expression of the trait gene.
After the co-cultivation treatment, the explants are washed and transferred to selection media supplemented with 500 mg/L timentin. Shoots are excised and placed on a shoot elongation medium. Shoots longer than 1 cm are placed on rooting medium for two to four weeks prior to transplanting to soil.
The primary transgenic plants (T0) are analyzed by PCR to confirm the presence of T-DNA. These results are confirmed by Southern hybridization in which DNA is electrophoresed on a 1% agarose gel and transferred to a positively charged nylon membrane (Roche Diagnostics). The PCR DIG Probe Synthesis Kit (Roche Diagnostics) is used to prepare a digoxigenin-labelled probe by PCR, and used as recommended by the manufacturer.
For the cycling drought assay repetitive stress is applied to plants without leading to desiccation. The water supply throughout the experiment is limited and plants are subjected to cycles of drought and re-watering. For measuring biomass production, plant fresh weight is determined one day after the final watering by cutting shoots and weighing them. At an equivalent degree of drought stress, tolerant plants are able to resume normal growth whereas susceptible plants have died or suffer significant injury resulting in shorter leaves and less dry matter.
Stress-tolerant soybean plants over-expressing stress related genes from Brassica napus, Glycine max, Zea mays or Oryza sativa for example have higher seed yields
Tolerance of drought, salinity and cold are measured using methods as described in example 3. Tolerant plants have higher survival rates and biomass production including seed yield, photosynthesis and dry matter production than susceptible plants.

### EXAMPLE 18

### Engineering Rapeseed/Canola Plants with Increased Yield, Preferably Under Condition of Transient and Repetitive Abiotic Stress by Over-Expressing Yield and Stress Related Genes for Example from Brassica napus, Glycine max, Zea Mays or Oryza sativa for example

[0499] Cotyledonary petioles and hypocotyls of 5-6 day-old young seedlings are used as explants for tissue culture and transformed according to Babic et al. (1998, Plant Cell Rep 17: 183-188). The commercial cultivar Westar (Agriculture Canada) is the standard variety used for transformation, but other varieties can be used.
Agrobacterium tumefaciens LBA4404 containing a binary vector is used for canola transformation. Many different binary vector systems have been described for plant transformation (e.g. An, G. in Agrobacterium Protocols. Methods in Molecular Biology vol 44, pp 47-62, Gartland K M A and M R Davey eds. Humana Press, Totowa, N.J.). Many are based on the vector pBIN19 described by Bevan (Nucleic Acid Research. 1984. 12:8711-8721) that includes a plant gene expression cassette flanked by the left and right border sequences from the Ti plasmid of Agrobacterium tumefaciens. A plant gene expression cassette consists of at least two genes—a selection marker gene and a plant promoter regulating the transcription of the cDNA or genomic DNA of the trait gene. Various selection marker genes can be used including the Arabidopsis gene encoding a mutated acetohydroxy acid synthase (AHAS) enzyme (U.S. Pat. Nos. 57,673,666 and 6225105). Similarly, various promoters can be used to regulate the trait gene to provide constitutive, developmental, tissue or environmental regulation of gene transcription. In this example, the 34S promoter (GenBank Accession numbers M59930 and X16673) is used to provide constitutive expression of the trait gene.
Canola seeds are surface-sterilized in 70% ethanol for 2 min., and then in 30% Clorox with a drop of Tween-20 for 10 min, followed by three rinses with sterilized distilled water. Seeds are then germinated in vitro 5 days on half strength MS medium without hormones, 1% sucrose, 0.7% Phytagar at 23° C., 16 hr. light. The cotyledon petiole explants with the cotyledon attached are excised from the in vitro seedlings, and inoculated with Agrobacterium by dipping the cut end of the petiole explant into the bacterial suspension. The explants are then cultured for 2 days on MSBAP-3 medium containing 3 mg/l BAP, 3% sucrose, 0.7% Phytagar at 23° C., 16 hr light. After two days of co-cultivation with Agrobacterium, the petiole explants are transferred to MSBAP-3 medium containing 3 mg/l BAP, cefotaxime, carbenicillin, or timentin (300 mg/l) for 7 days, and then cultured on MSBAP-3 medium with cefotaxime, carbenicillin, or timentin and selection agent until shoot regeneration. When the shoots are 5-10 mm in length, they are cut and transferred to shoot elongation medium (MSBAP-0.5, containing 0.5 mg/l BAP). Shoots of about 2 cm in length are transferred to the rooting medium (MS0) for root induction.
Samples of the primary transgenic plants (T0) are analyzed by PCR to confirm the presence of T-DNA. These results are confirmed by Southern hybridization in which DNA is electrophoresed on a 1% agarose gel and transferred to a positively charged nylon membrane (Roche Diagnostics). The PCR DIG Probe Synthesis Kit (Roche Diagnostics) is used to prepare a digoxigenin-labelled probe by PCR, and used as recommended by the manufacturer.
For the cycling drought assay repetitive stress is applied to plants without leading to desiccation. The water supply throughout the experiment is limited and plants are subjected to cycles of drought and re-watering. For measuring biomass production, plant fresh weight is determined one day after the final watering by cutting shoots and weighing them. At an equivalent degree of drought stress, tolerant plants are able to resume normal growth whereas susceptible plants have died or suffer significant injury resulting in shorter leaves and less dry matter.
The transgenic plants are then evaluated for their improved stress tolerance according to the method described in Example 3. It is found that transgenic Rapeseed/Canola over-expressing stress related genes from Brassica napus, Glycine max, Zea mays or Oryza sativa for example are more tolerant to environmental stress than non-transgenic control plants. Tolerant plants have higher survival rates and biomass production including seed yield, photosynthesis and dry matter production than susceptible plants.

### EXAMPLE 19

### Engineering Corn Plants with Increased Yield, Preferably Under Condition of Transient and Repetitive Abiotic Stress by Over-Expressing Yield and Stress Related Genes for Example from Brassica napus, Glycine Max, Zea Mays or Oryza sativa for Example

[0500] Transformation of corn (Zea mays L.) is performed with a modification of the method described by Ishida et al. (1996. Nature Biotech 14745-50). Transformation is genotype-dependent in corn and only specific genotypes are amenable to transformation and regeneration. The inbred line A188 (University of Minnesota) or hybrids with A188 as a parent are good sources of donor material for transformation (Fromm et al. 1990 Biotech 8:833-839), but other genotypes can be used successfully as well. Ears are harvested from corn plants at approximately 11 days after pollination (DAP) when the length of immature embryos is about 1 to 1.2 mm. Immature embryos are co-cultivated with Agrobacterium tumefaciens that carry “super binary” vectors and transgenic plants are recovered through organogenesis. The super binary vector system of Japan Tobacco is described in WO patents WO94/00977 and WO95/06722. Vectors are constructed as described. Various selection marker genes can be used including the corn gene encoding a mutated acetohydroxy acid synthase (AHAS) enzyme (U.S. Pat. Nos. 6,025,541). Similarly, various promoters can be used to regulate the trait gene to provide constitutive, developmental, tissue or environmental regulation of gene transcription. In this example, the 34S promoter (GenBank Accession numbers M59930 and X16673) is used to provide constitutive expression of the trait gene.
Excised embryos are grown on callus induction medium, then corn regeneration medium, containing imidazolinone as a selection agent. The Petri plates were incubated in the light at 25° C. for 2-3 weeks, or until shoots develop. The green shoots from each embryo are transferred to corn rooting medium and incubated at 25° C. for 2-3 weeks, until roots develop. The rooted shoots are transplanted to soil in the greenhouse. T1 seeds are produced from plants that exhibit tolerance to the imidazolinone herbicides and are PCR positive for the transgenes.
The T1 transgenic plants are then evaluated for their improved stress tolerance according to the methods described in Example 3. The T1 generation of single locus insertions of the T-DNA will segregate for the transgene in a 1:2:1 ratio. Those progeny containing one or two copies of the transgene (¾ of the progeny) are tolerant of the imidazolinone herbicide, and exhibit greater tolerance of drought stress than those progeny lacking the transgenes. Tolerant plants have higher seed yields. Homozygous T2 plants exhibited similar phenotypes. Hybrid plants (F1 progeny) of homozygous trans-genic plants and non-transgenic plants also exhibited increased environmental stress tolerance.
For the cycling drought assay repetitive stress is applied to plants without leading to desiccation. The water supply throughout the experiment is limited and plants are subjected to cycles of drought and re-watering. For measuring biomass production, plant fresh weight is determined one day after the final watering by cutting shoots and weighing them. At an equivalent degree of drought stress, tolerant plants are able to resume normal growth whereas susceptible plants have died or suffer significant injury resulting in shorter leaves and less dry matter.
Tolerance to salinity and cold are measured using methods as described in the previous example 3. Again, transgenic corn plants over-expressing stress related genes from Brassica napus, Glycine max, Zea mays or Oryza sativa for example are found to be tolerant to environmental stresses. Tolerant plants have higher survival rates and biomass production including seed yield, photosynthesis and dry matter production than susceptible plants.

### EXAMPLE 20

### Engineering Wheat Plants with Increased Yield, Preferably Under Condition of Transient and Repetitive Abiotic Stress by Over-Expressing Yield and Stress Related Genes for Example from Brassica napus, Glycine max, Zea Mays or Oryza sativa for Example

[0501] Transformation of wheat is performed with the method described by Ishida et al. (1996 Nature Biotech. 14745-50). The cultivar Bobwhite (available from CYMMIT, Mexico) is commonly used in transformation. Immature embryos are co-cultivated with Agrobacterium tumefaciens that carry “super binary” vectors, and transgenic plants are recovered through organogenesis. The super binary vector system of Japan Tobacco is described in WO patents WO94/00977 and WO95/06722. Vectors are constructed as described. Various selection marker genes can be used including the maize gene encoding a mutated acetohydroxy acid synthase (AHAS) enzyme (U.S. Pat. No. 6,025,541). Similarly, various promoters can be used to regulate the trait gene to provide constitutive, developmental, tissue or environmental regulation of gene transcription. In this example, the 34S promoter (GenBank Accession numbers M59930 and X16673) is used to provide constitutive expression of the trait gene.
After incubation with Agrobacterium, the embryos are grown on callus induction medium, then regeneration medium, containing imidazolinone as a selection agent. The Petri plates are incubated in the light at 25° C. for 2-3 weeks, or until shoots develop. The green shoots are transferred from each embryo to rooting medium and incubated at 25° C. for 2-3 weeks, until roots develop. The rooted shoots are transplanted to soil in the greenhouse. T1 seeds are produced from plants that exhibit tolerance to the imidazolinone herbicides and which are PCR positive for the transgenes.
The T1 transgenic plants are then evaluated for their improved stress tolerance according to the method described in the previous example 3.
For the cycling drought assay repetitive stress is applied to plants without leading to desiccation. The water supply throughout the experiment is limited and plants are subjected to cycles of drought and re-watering. For measuring biomass production, plant fresh weight is determined one day after the final watering by cutting shoots and weighing them. At an equivalent degree of drought stress, tolerant plants are able to resume normal growth whereas susceptible plants have died or suffer significant injury resulting in shorter leaves and less dry matter.
The T1 generation of single locus insertions of the T-DNA will segregate for the trans-gene in a 1:2:1 ratio. Those progeny containing one or two copies of the transgene (¾ of the progeny) are tolerant of the imidazolinone herbicide, and exhibit greater tolerance of drought stress than those progeny lacking the transgenes. Tolerant plants have higher survival rates and biomass production including seed yield, photosynthesis and dry matter production than susceptible plants. Homozygous T2 plants exhibited similar phenotypes. Tolerance of salinity and cold are measured using methods as described in the previous examples. Plants that overexpressed stress related genes from Brassica napus, Glycine max, Zea mays or Oryza sativa for example have tolerance to drought, salinity or cold and displayed higher survival rates and biomass production including seed yield, photosynthesis and dry matter production than susceptible plants.

### EXAMPLE 21

### Identification of Identical and Heterologous Genes

[0502] Gene sequences can be used to identify identical or heterologous genes from cDNA or genomic libraries. Identical genes (e.g. full-length cDNA clones) can be isolated via nucleic acid hybridization using for example cDNA libraries. Depending on the abundance of the gene of interest, 100,000 up to 1,000,000 recombinant bacteriophages are plated and transferred to nylon membranes. After denaturation with alkali, DNA is immobilized on the membrane by e.g. UV cross linking. Hybridization is carried out at high stringency conditions. In aqueous solution, hybridization and washing is performed at an ionic strength of 1 M NaCl and a temperature of 68° C. Hybridization probes are generated by e.g. radioactive (³²P) nick transcription labeling (High Prime, Roche, Mannheim, Germany). Signals are detected by autoradiography.
Partially identical or heterologous genes that are similar but not identical can be identified in a manner analogous to the above-described procedure using low stringency hybridization and washing conditions. For aqueous hybridization, the ionic strength is normally kept at 1 M NaCl while the temperature is progressively loared from 68 to 42° C.
Isolation of gene sequences with homology (or sequence identity/similarity) in only a distinct domain of for example 10-20 amino acids can be carried out using synthetic radio labeled oligonucleotide probes. Radiolabeled oligonucleotides are prepared by phosphorylation of the 5-prime end of two complementary oligonucleotides with T4 polynucleotide kinase. The complementary oligonucleotides are annealed and ligated to form concatemers. The double stranded concatemers are then radiolabeled by, for example, nick transcription. Hybridization is normally performed at low stringency conditions using high oligonucleotide concentrations.
Oligonucleotide hybridization solution:

### 6×SSC

[0503] 0.01 M sodium phosphate

### 1 mM EDTA (pH 8)

### 0.5% SDS

[0504] 100 μg/ml denatured salmon sperm DNA
0.1% nonfat dried milk
During hybridization, temperature is lowered stepwise to 5-10° C. below the estimated oligonucleotide Tₘ or down to room temperature followed by washing steps and autoradiography. Washing is performed with low stringency such as 3 washing steps using 4×SSC. Further details are described by Sambrook, J. et al., 1989, “Molecular Cloning: A Laboratory Manual,” Cold Spring Harbor Laboratory Press or Ausubel, F. M. et al., 1994, “Current Protocols in Molecular Biology,” John Wiley & Sons.

### EXAMPLE 22

### Identification of Identical or homologous Genes by Screening Expression Libraries with Antibodies

[0505] c-DNA clones can be used to produce recombinant polypeptide for example in E. coli (e.g. Qiagen QIAexpress pQE system). Recombinant polypeptides are then normally affinity purified via Ni-NTA affinity chromatography (Qiagen). Recombinant polypeptides are then used to produce specific antibodies for example by using standard techniques for rabbit immunization. Antibodies are affinity purified using a Ni-NTA column saturated with the recombinant antigen as described by Gu et al., 1994, BioTechniques 17:257-262. The antibody can then be used to screen expression cDNA libraries to identify identical or heterologous genes via an immunological screening (Sambrook, J. et al., 1989, “Molecular Cloning: A Laboratory Manual,” Cold Spring Harbor Laboratory Press or Ausubel, F. M. et al., 1994, “Current Protocols in Molecular Biology”, John Wiley & Sons).

### EXAMPLE 23

### In Vivo Mutagenesis

[0506] In vivo mutagenesis of microorganisms can be performed by passage of plasmid (or other vector) DNA through E. coli or other microorganisms (e.g. Bacillus spp. or yeasts such as Saccharomyces cerevisiae), which are impaired in their capabilities to maintain the integrity of their genetic information. Typical mutator strains have mutations in the genes for the DNA repair system (e.g., mutHLS, mutD, mutT, etc.; for reference, see Rupp, W. D., 1996, DNA repair mechanisms, in: Escherichia coli and Salmonella, p. 2277-2294, ASM: Washington.) Such strains are well known to those skilled in the art. The use of such strains is illustrated, for example, in Greener, A. and Callahan, M., 1994, Strategies 7: 32-34. Transfer of mutated DNA molecules into plants is preferably done after selection and testing in microorganisms. Transgenic plants are generated according to various examples within the exemplification of this document.

[0507] Plant Screening for Growth Under Low Temperature Conditions

In a standard experiment soil was prepared as 3.5:1 (v/v) mixture of nutrient rich soil (GS90, Tantau, Wansdorf, Germany) and sand. Pots were filled with soil mixture and placed into trays. Water was added to the trays to let the soil mixture take up appropriate amount of water for the sowing procedure. The seeds for transgenic A. thaliana plants were sown in pots (6 cm diameter). Pots were collected until they filled a tray for the growth chamber. Then the filled tray was covered with a transparent lid and transferred into the shelf system of the precooled (4° C.-5° C.) growth chamber. Stratification was established for a period of 2-3 days in the dark at 4° C.-5° C. Germination of seeds and growth was initiated at a growth condition of 20° C., 60% relative humidity, 16 h photoperiod and illumination with fluorescent light at approximately 200 μmol/m2s. Covers were removed 7 days after sowing. BASTA selection was done at day 9 after sowing by spraying pots with plantlets from the top. Therefore, a 0.07% (v/v) solution of BASTA concentrate (183 g/l glufosinate-ammonium) in tap water was sprayed. Trans-genic events and wildtype control plants were distributed randomly over the chamber. The location of the trays inside the chambers was changed on working days from day 7 after sowing. Watering was carried out every two days after covers were removed from the trays. Plants were individualized 12-13 days after sowing by removing the surplus of seedlings leaving one seedling in a pot. Cold (chilling to 11° C.-12° C.) was applied 14 days after sowing until the end of the experiment. For measuring biomass performance, plant fresh weight was determined at harvest time (29-36 days after sowing) by cutting shoots and weighing them. Plants were in the stage prior to flowering and prior to growth of inflorescence when harvested. Transgenic plants were compared to the non-transgenic wild-type control plants harvested at the same day. Significance values for the statistical significance of the biomass changes were calculated by applying the ‘student's’ t test (parameters: two-sided, unequal variance).
Up to five lines per transgenic construct were tested in successive experimental levels (up to 4). Only constructs that displayed positive performance were subjected to the next experimental level. Usually in the first level five plants per construct were tested and in the subsequent levels 30-74 plants were tested. Biomass performance was evaluated as described above.
Table VIII-B: Biomass production of transgenic A. thaliana after imposition of chilling stress.
Biomass production was measured by weighing plant rosettes. Biomass increase was calculated as ratio of average weight of transgenic plants compared to average weight of wild-type control plants from the same experiment. Biomass production was measured by weighing plant rosettes. Biomass increase was calculated as ratio of average weight for transgenic plants compared to average weight of wild type control plants from the same experiment. The maximum biomass increase seen within the group of transgenic events is given for constructs showing a significance value ≦0.3 and a biomass increase ≧5% (ratio≧1.05).

TABLE VIII-B
(LT)

| SeqID | Target | Locus | Biomass Increase |
|---|---|---|---|
| 724 | Cytoplasmic | Yal043c-a | 1.389 |
| 728 | Plastidic | Ybr071w | 1.350 |
| 732 | Cytoplasmic | Ybr180w | 1.374 |
| 764 | Cytoplasmic | Ydr284c | 1.500 |
| 1157 | Cytoplasmic | Ykr097w | 1.799 |
| 1157 | Mitochondric | Ykr097w | 1.533 |
| 1352 | Cytoplasmic | Ynr012w | 1.399 |

[0508] Plant Screening for Biomass Increase Under Standardised Growth Conditions

In this experiment, a plant screening for yield increase (in this case: biomass yield increase) under standardised growth conditions in the absence of substantial abiotic stress has been performed. In a standard experiment soil is prepared as 3.5:1 (v/v) mixture of nutrient rich soil (GS90, Tantau, Wansdorf, Germany) and quarz sand. Alternatively, plants were sown on nutrient rich soil (GS90, Tantau, Germany). Pots were filled with soil mixture and placed into trays. Water was added to the trays to let the soil mixture take up appropriate amount of water for the sowing procedure. The seeds for transgenic A. thaliana plants and their non-trangenic wild-type controls were sown in pots (6 cm diameter). Then the filled tray was covered with a transparent lid and transferred into a precooled (4° C.-5° C.) and darkened growth chamber. Stratification was established for a period of 3-4 days in the dark at 4° C.-5° C. Germination of seeds and growth was initiated at a growth condition of 20° C., 60% relative humidity, 16 h photoperiod and illumination with fluorescent light at approximately 170 μmol/m2s. Covers were removed 7-8 days after sowing. BASTA selection was done at day 10 or day 11 (9 or 10 days after sowing) by spraying pots with plantlets from the top. In the standard experiment, a 0.07% (v/v) solution of BASTA concentrate (183 g/l glufosinate-ammonium) in tap water was sprayed once or, alternatively, a 0.02% (v/v) solution of BASTA was sprayed three times. The wild-type control plants were sprayed with tap water only (instead of spraying with BASTA dissolved in tap water) but were otherwise treated identically. Plants were individualized 13-14 days after sowing by removing the surplus of seedlings and leaving one seedling in soil. Transgenic events and wild-type control plants were evenly distributed over the chamber.
Watering was carried out every two days after removing the covers in a standard experiment or, alternatively, every day. For measuring biomass performance, plant fresh weight was determined at harvest time (24-29 days after sowing) by cutting shoots and weighing them. Plants were in the stage prior to flowering and prior to growth of inflorescence when harvested. Transgenic plants were compared to the non-transgenic wild-type control plants harvested at the same day. Significance values for the statistical significance of the biomass changes were calculated by applying the ‘student's’ t test (parameters: two-sided, unequal variance).
Per transgenic construct 3-4 independent transgenic lines (=events) were tested (24-28 plants per construct) and biomass performance was evaluated as described above.

TABLE VIII-C
Biomass production of transgenic A. thaliana
grown under standardised growth conditions.

| SeqID | Target | Locus | Biomass Increase |
|---|---|---|---|
| 63 | Plastidic | B0312 | 1.353 |
| 724 | Cytoplasmic | Yal043c-a | 1.411 |
| 732 | Cytoplasmic | Ybr180w | 1.449 |
| 818 | Cytoplasmic | Yhr047c | 1.179 |
| 1157 | Mitochondric | Ykr097w | 1.619 |
| 1352 | Cytoplasmic | Ynr012w | 1.314 |

Biomass production was measured by weighing plant rosettes. Biomass increase was calculated as ratio of average weight for transgenic plants compared to average weight of wild type control plants from the same experiment. The maximum biomass increase seen within the group of transgenic events is given for constructs showing a significance value ≦0.3 and a biomass increase ≧5% (ratio ≧1.05

[0509] Plant Screening (Arabidopsis) for Growth Under Limited Nitrogen Supply

Per transgenic construct 4 independent transgenic lines (=events) were tested (23-28 plants per construct). Arabidopsis thaliana seeds are sown in pots containing a 1:1 (v:v) mixture of nutrient depleted soil (“Einheitserde Typ 0”, 30% clay, Tantau, Wansdorf Germany) and sand. Germination is induced by a four day period at 4° C., in the dark. Subsequently the plants are grown under standard growth conditions (photoperiod of 16 h light and 8 h dark, 20° C., 60% relative humidity, and a photon flux density of approximately 170 μE). The plants are grown and cultured, inter alia they are watered every second day with a N-depleted nutrient solution. The N-depleted nutrient solution e.g. contains beneath water

| mineral nutrient | final concentration | |
|---|---|---|
| KCl | 3.00 | mM |
| MgSO₄ × 7 H₂O | 0.5 | mM |
| CaCl₂ × 6 H₂O | 1.5 | mM |
| K₂SO₄ | 1.5 | mM |
| NaH₂PO₄ | 1.5 | mM |
| Fe-EDTA | 40 | μM |
| H₃BO₃ | 25 | μM |
| MnSO₄ × H₂O | 1 | μM |
| ZnSO₄ × 7 H₂O | 0.5 | μM |
| Cu₂SO₄ × 5 H₂O | 0.3 | μM |
| Na₂MoO₄ × 2 H₂O | 0.05 | μM |

After 9 to 10 days the plants are individualized. After a total time of 28 to 31 days the plants are harvested and rated by the fresh weight of the aerial parts of the plants. The biomass increase has been measured as ratio of the fresh weight of the aerial parts of the respective transgenic plant and the non-transgenic wild type plant harvested at the same day.
The results of screening for growth under limited nitrogen supply are summarized in table VIII-D.
Table VIII-D: Biomass production of transgenic Arabidopsis thaliana grown under limited nitrogen supply
Biomass production was measured by weighing plant rosettes. Biomass increase was calculated as ratio of average weight for transgenic plants compared to average weight of wild type control plants from the same experiment. The maximum biomass increase seen within the group of transgenic events is given for constructs showing a significance value ≦0.3 and a biomass increase ≧5% (ratio≧1.05).

TABLE VIII-D
(NUE)

| SeqID | Target | Locus | Biomass Increase |
|---|---|---|---|
| 63 | Plastidic | B0312 | 1.180 |
| 724 | Cytoplasmic | Yal043c-a | 1.292 |
| 732 | Cytoplasmic | Ybr180w | 1.739 |
| 764 | Cytoplasmic | Ydr284c | 1.352 |
| 814 | Cytoplasmic | Ydr445c | 1.197 |
| 925 | Plastidic | Yhr190w | 1.181 |
| 1021 | Cytoplasmic | Ykl094w | 1.255 |
| 1157 | Cytoplasmic | Ykr097w | 1.313 |
| 1157 | Mitochondric | Ykr097w | 1.264 |
| 1352 | Cytoplasmic | Ynr012w | 1.194 |

### FIGURES

[0510] FIG. 1 Vector VC-MME220-1 qcz SEQ ID NO: 41 used for cloning gene of interest for non-targeted expression.

[0511] FIG. 2 Vector VC-MME221-1 qcz SEQ ID NO: 46 used for cloning gene of interest for non-targeted expression.

[0512] FIG. 3 Vector VC-MME354-1 QCZ SEQ ID NO: 32 used for cloning gene of interest for targeted expression.

[0513] FIG. 4 Vector VC-MME432-1 qcz SEQ ID NO: 42 used for cloning gene of interest for targeted expression.

[0514] FIG. 5 Vector VC-MME489-1 QCZ SEQ ID NO: 56 used for cloning gene of interest for non-targeted expression and cloning of a targeting sequence.

[0515] FIG. 6 Vector pMTX0270p SEQ ID NO: 9 used for cloning of a targeting sequence.

[0516] FIG. 7. Vector pMTX155 (SEQ ID NO: 31) used for used for cloning gene of interest for non-targeted expression.

[0517] FIG. 8. Vector VC-MME356-1 QCZ (SEQ ID NO: 34) used for mitochondric targeted expression.

[0518] FIG. 9. Vector VC-MME301-1 QCZ (SEQ ID NO: 36) used for non-targeted expression in preferentially seeds.

[0519] FIG. 10. Vector pMTX461 korrp (SEQ ID NO: 37) used for plastidic targeted expression in preferentially seeds.

[0520] FIG. 11. Vector VC-MME462-1 QCZ (SEQ ID NO: 39) used for mitochondric targeted expression in preferentially seeds.

[0521] FIG. 12. Vector VC-MME431-1 qcz (SEQ ID NO: 44) used for mitochondric targeted expression.

[0522] FIG. 13. Vector pMTX447 korr (SEQ ID NO: 47) used for plastidic targeted expression.

[0523] FIG. 14. Vector VC-MME445-1 qcz (SEQ ID NO: 49) used for mitochondric targeted expression.

[0524] FIG. 15. Vector VC-MME289-1 qcz (SEQ ID NO: 51) used for non targeted expression in preferentially seeds.

[0525] FIG. 16. Vector VC-MME464-1 qcz (SEQ ID NO: 52) used for plastidic targeted expression in preferentially seeds.

[0526] FIG. 17. Vector VC-MME465-1 qcz (SEQ ID NO: 54) used for mitochondric targeted expression in preferentially seeds.

TABLE IA
Nucleic acid sequence ID numbers

| | | | | | 5. | | |
|---|---|---|---|---|---|---|---|
| Appli- | 1. | 2. | 3. | 4. | Lead | 6. | 7. |
| cation | Hit | Project | Locus | Organism | SEQ ID | Target | SEQ IDs of Nucleic Acid Homologs |
| 1 | 1 | CD_OEX_1 | B0312 | E. coli | 63 | Plastidic | 65, 67, 69, 71, 73, 75, 77, 79, 81, 83, 85, 87, 89, 91, 93, 95, 97, |
| | | | | | | | 99, 101, 103, 105, 107, 109, 111, 113, 115, 117, 119, 121, 123, |
| | | | | | | | 125, 127, 129, 131, 133, 135, 137, 139, 141, 143, 145, 147, 149, |
| | | | | | | | 151, 153, 155, 157, 159, 161, 163, 165, 167, 169, 171, 173, 175, |
| | | | | | | | 177, 179, 181, 183, 185, 187, 189, 191, 193, 195, 197, 199, 201, |
| | | | | | | | 203, 205, 207, 209, 211, 213, 215, 217, 219, 221, 223, 225, 227, |
| | | | | | | | 229, 231, 233, 235, 237, 239, 241, 243, 245, 247, 249, 251, 253, |
| | | | | | | | 255, 257, 259, 261, 263, 265, 267, 269, 271, 273, 275, 277, 279, |
| | | | | | | | 281, 283, 285, 287, 289, 291, 293, 295, 297, 299, 301, 303, 305, |
| | | | | | | | 307, 309, 311, 313, 315, 317, 319, 321, 323, 325, 327, 329, 331, |
| | | | | | | | 333, 335, 337, 339, 341, 343, 345, 347, 349, 351, 353, 355, 357, |
| | | | | | | | 359, 361, 363, 365, 367, 369, 371, 373, 375, 377, 379, 381, 383, |
| | | | | | | | 385, 387, 389, 391, 393, 395, 397, 399, 401, 403, 405, 407, 409, |
| | | | | | | | 411, 413, 415, 417, 419, 421, 423, 425, 427, 429, 431, 433, 435, |
| | | | | | | | 437, 439, 441, 443, 445, 447, 449, 451, 453, 455, 457, 459, 461, |
| | | | | | | | 463, 465, 467, 469, 471, 473, 475, 477, 479, 481, 483, 485, 487, |
| | | | | | | | 489, 491, 493, 495, 497, 499, 501, 503, 505, 507, 509, 511, 513, |
| | | | | | | | 515, 517 |
| 1 | 2 | CD_OEX_1 | B3182 | E. coli | 623 | Cytoplasmic | 625, 627, 629, 631, 633, 635, 637, 639, 641, 643, 645, 647, 649, |
| | | | | | | | 651, 653, 655, 657, 659, 661, 663, 665, 667, 669, 671, 673, 675, |
| | | | | | | | 677, 679, 681, 683, 685, 687, 689, 691, 693, 695, 697, 699, 701, |
| | | | | | | | 703, 705, 707, 709, 711, 713, 715 |
| 1 | 3 | CD_OEX_1 | YAL043C-A | S. cerevisiae | 724 | Cytoplasmic | — |
| 1 | 4 | CD_OEX_1 | YBR071W | S. cerevisiae | 728 | Plastidic | — |
| 1 | 5 | CD_OEX_1 | YBR180W | S. cerevisiae | 732 | Cytoplasmic | 734, 736, 738, 740, 742, 744, 746, 748, 750, 752, 754 |
| 1 | 6 | CD_OEX_1 | YDR284C | S. cerevisiae | 764 | Cytoplasmic | 766, 768, 770, 772, 774, 776, 778, 780, 782, 784, 786, 788, 790, |
| | | | | | | | 792 |
| 1 | 7 | CD_OEX_1 | YDR445C | S. cerevisiae | 814 | Cytoplasmic | — |
| 1 | 8 | CD_OEX_1 | YHR047C | S. cerevisiae | 818 | Cytoplasmic | 820, 822, 824, 826, 828, 830, 832, 834, 836, 838, 840, 842, 844, |
| | | | | | | | 846, 848, 850, 852, 854, 856, 858, 860, 862, 864, 866, 868, 870, |
| | | | | | | | 872, 874, 876, 878, 880, 882, 884, 886, 888, 890, 892, 894, 896, |
| | | | | | | | 898, 900, 902, 904, 906, 908, 910 |
| 1 | 9 | CD_OEX_1 | YHR190W | S. cerevisiae | 925 | Plastidic | 927, 929, 931, 933, 935, 937, 939, 941, 943, 945, 947, 949, 951, |
| | | | | | | | 953, 955, 957, 959, 961, 963, 965, 967, 969, 971, 973, 975, 977, |
| | | | | | | | 979, 981, 983, 985, 987, 989, 991, 993, 995, 997, 999, 1001 |
| 1 | 10 | CD_OEX_1 | YKL094W | S. cerevisiae | 1021 | Cytoplasmic | 1023, 1025, 1027, 1029, 1031, 1033, 1035, 1037, 1039, 1041, |
| | | | | | | | 1043, 1045, 1047, 1049, 1051, 1053, 1055, 1057, 1059, 1061, |
| | | | | | | | 1063, 1065, 1067, 1069, 1071, 1073, 1075, 1077, 1079, 1081, |
| | | | | | | | 1083, 1085, 1087, 1089, 1091, 1093, 1095, 1097, 1099, 1101, |
| | | | | | | | 1103, 1105, 1107, 1109, 1111, 1113, 1115, 1117, 1119, 1121, |
| | | | | | | | 1123, 1125, 1127, 1129, 1131, 1133, 1135, 1137, 1139, 1141, |
| | | | | | | | 1143, 1145, 1147, 1149, 1151 |
| 1 | 11 | CD_OEX_1 | YKR097W | S. cerevisiae | 1157 | Cytoplasmic | 1159, 1161, 1163, 1165, 1167, 1169, 1171, 1173, 1175, 1177, |
| | | | | | | | 1179, 1181, 1183, 1185, 1187, 1189, 1191, 1193, 1195, 1197, |
| | | | | | | | 1199, 1201, 1203, 1205, 1207, 1209, 1211, 1213, 1215, 1217, |
| | | | | | | | 1219, 1221, 1223, 1225, 1227, 1229, 1231, 1233, 1235, 1237, |
| | | | | | | | 1239, 1241, 1243, 1245, 1247, 1249, 1251, 1253, 1255, 1257, |
| | | | | | | | 1259, 1261, 1263, 1265, 1267, 1269, 1271, 1273, 1275, 1277, |
| | | | | | | | 1279, 1281, 1283, 1285, 1287, 1289, 1291, 1293, 1295, 1297, |
| | | | | | | | 1299, 1301, 1303, 1305, 1307, 1309, 1311, 1313, 1315, 1317, |
| | | | | | | | 1319, 1321, 1323, 1325, 1327, 1329, 1331, 1333, 1335 |
| 1 | 12 | CD_OEX_1 | YNR012W | S. cerevisiae | 1352 | Cytoplasmic | 1354, 1356, 1358, 1360, 1362, 1364, 1366, 1368, 1370, 1372, |
| | | | | | | | 1374, 1376, 1378, 1380, 1382, 1384, 1386 |
| 1 | 13 | CD_OEX_1 | YPL133C | S. cerevisiae | 1423 | Plastidic | 1425, 1427, 1429, 1431, 1433, 1435, 1437, 1439, 1441, 1443, |
| | | | | | | | 1445, 1447, 1449, 1451, 1453, 1455, 1457, 1459, 1461, 1463 |

TABLE IB
Nucleic acid sequence ID numbers

| | | | | | 5. | | |
|---|---|---|---|---|---|---|---|
| Appli- | 1. | 2. | 3. | 4. | Lead | 6. | 7. |
| cation | Hit | Project | Locus | Organism | SEQ ID | Target | SEQ IDs of Nucleic Acid Homologs |
| 1 | 1 | CD_OEX_1 | B0312 | E. coli | 63 | Plastidic | 519, 521, 523, 525, 527, 529, 531, 533, 535, 537, 539, 541, 543, |
| | | | | | | | 545, 547, 549, 551, 553, 555, 557, 559, 561, 563, 565, 567, 569, |
| | | | | | | | 571, 573, 575, 577, 579, 581, 583, 585, 587, 589, 591, 593, 595, |
| | | | | | | | 597, 599, 601, 603, 605, 607, 609, 611, 613, 1473 |
| 1 | 2 | CD_OEX_1 | B3182 | E. coli | 623 | Cytoplasmic | — |
| 1 | 3 | CD_OEX_1 | YAL043C-A | S. cerevisiae | 724 | Cytoplasmic | — |
| 1 | 4 | CD_OEX_1 | YBR071W | S. cerevisiae | 728 | Plastidic | — |
| 1 | 5 | CD_OEX_1 | YBR180W | S. cerevisiae | 732 | Cytoplasmic | — |
| 1 | 6 | CD_OEX_1 | YDR284C | S. cerevisiae | 764 | Cytoplasmic | 794, 796, 798, 800, 802, 804, 806, 1477, 1479, 1481 |
| 1 | 7 | CD_OEX_1 | YDR445C | S. cerevisiae | 814 | Cytoplasmic | — |
| 1 | 8 | CD_OEX_1 | YHR047C | S. cerevisiae | 818 | Cytoplasmic | 912, 914, 1485 |
| 1 | 9 | CD_OEX_1 | YHR190W | S. cerevisiae | 925 | Plastidic | 1003, 1005, 1007, 1009, 1011, 1489, 1491 |
| 1 | 10 | CD_OEX_1 | YKL094W | S. cerevisiae | 1021 | Cytoplasmic | 1495 |
| 1 | 11 | CD_OEX_1 | YKR097W | S. cerevisiae | 1157 | Cytoplasmic | 1337, 1339, 1341, 1499 |
| 1 | 12 | CD_OEX_1 | YNR012W | S. cerevisiae | 1352 | Cytoplasmic | 1388, 1390, 1392, 1394, 1396, 1398, 1400, 1402, 1404, 1406, |
| | | | | | | | 1408, 1410 |
| 1 | 13 | CD_OEX_1 | YPL133C | S. cerevisiae | 1423 | Plastidic | — |

TABLE IIA
Amino acid sequence ID numbers

| | | | | | 5. | | |
|---|---|---|---|---|---|---|---|
| Appli- | 1. | 2. | 3. | 4. | Lead | 6. | 7. |
| cation | Hit | Project | Locus | Organism | SEQ ID | Target | SEQ IDs of Nucleic Acid Homologs |
| 1 | 1 | CD_OEX_1 | B0312 | E. coli | 64 | Plastidic | 66, 68, 70, 72, 74, 76, 78, 80, 82, 84, 86, 88, 90, 92, 94, 96, 98, |
| | | | | | | | 100, 102, 104, 106, 108, 110, 112, 114, 116, 118, 120, 122, 124, |
| | | | | | | | 126, 128, 130, 132, 134, 136, 138, 140, 142, 144, 146, 148, 150, |
| | | | | | | | 152, 154, 156, 158, 160, 162, 164, 166, 168, 170, 172, 174, 176, |
| | | | | | | | 178, 180, 182, 184, 186, 188, 190, 192, 194, 196, 198, 200, 202, |
| | | | | | | | 204, 206, 208, 210, 212, 214, 216, 218, 220, 222, 224, 226, 228, |
| | | | | | | | 230, 232, 234, 236, 238, 240, 242, 244, 246, 248, 250, 252, 254, |
| | | | | | | | 256, 258, 260, 262, 264, 266, 268, 270, 272, 274, 276, 278, 280, |
| | | | | | | | 282, 284, 286, 288, 290, 292, 294, 296, 298, 300, 302, 304, 306, |
| | | | | | | | 308, 310, 312, 314, 316, 318, 320, 322, 324, 326, 328, 330, 332, |
| | | | | | | | 334, 336, 338, 340, 342, 344, 346, 348, 350, 352, 354, 356, 358, |
| | | | | | | | 360, 362, 364, 366, 368, 370, 372, 374, 376, 378, 380, 382, 384, |
| | | | | | | | 386, 388, 390, 392, 394, 396, 398, 400, 402, 404, 406, 408, 410, |
| | | | | | | | 412, 414, 416, 418, 420, 422, 424, 426, 428, 430, 432, 434, 436, |
| | | | | | | | 438, 440, 442, 444, 446, 448, 450, 452, 454, 456, 458, 460, 462, |
| | | | | | | | 464, 466, 468, 470, 472, 474, 476, 478, 480, 482, 484, 486, 488, |
| | | | | | | | 490, 492, 494, 496, 498, 500, 502, 504, 506, 508, 510, 512, 514, |
| | | | | | | | 516, 518 |
| 1 | 2 | CD_OEX_1 | B3182 | E. coli | 624 | Cytoplasmic | 626, 628, 630, 632, 634, 636, 638, 640, 642, 644, 646, 648, 650, |
| | | | | | | | 652, 654, 656, 658, 660, 662, 664, 666, 668, 670, 672, 674, 676, |
| | | | | | | | 678, 680, 682, 684, 686, 688, 690, 692, 694, 696, 698, 700, 702, |
| | | | | | | | 704, 706, 708, 710, 712, 714, 716 |
| 1 | 3 | CD_OEX_1 | YAL043C-A | S. cerevisiae | 725 | Cytoplasmic | — |
| 1 | 4 | CD_OEX_1 | YBR071W | S. cerevisiae | 729 | Plastidic | — |
| 1 | 5 | CD_OEX_1 | YBR180W | S. cerevisiae | 733 | Cytoplasmic | 735, 737, 739, 741, 743, 745, 747, 749, 751, 753, 755 |
| 1 | 6 | CD_OEX_1 | YDR284C | S. cerevisiae | 765 | Cytoplasmic | 767, 769, 771, 773, 775, 777, 779, 781, 783, 785, 787, 789, 791, |
| | | | | | | | 793 |
| 1 | 7 | CD_OEX_1 | YDR445C | S. cerevisiae | 815 | Cytoplasmic | — |
| 1 | 8 | CD_OEX_1 | YHR047C | S. cerevisiae | 819 | Cytoplasmic | 821, 823, 825, 827, 829, 831, 833, 835, 837, 839, 841, 843, 845, |
| | | | | | | | 847, 849, 851, 853, 855, 857, 859, 861, 863, 865, 867, 869, 871, |
| | | | | | | | 873, 875, 877, 879, 881, 883, 885, 887, 889, 891, 893, 895, 897, |
| | | | | | | | 899, 901, 903, 905, 907, 909, 911 |
| 1 | 9 | CD_OEX_1 | YHR190W | S. cerevisiae | 926 | Plastidic | 928, 930, 932, 934, 936, 938, 940, 942, 944, 946, 948, 950, 952, |
| | | | | | | | 954, 956, 958, 960, 962, 964, 966, 968, 970, 972, 974, 976, 978, |
| | | | | | | | 980, 982, 984, 986, 988, 990, 992, 994, 996, 998, 1000, 1002 |
| 1 | 10 | CD_OEX_1 | YKL094W | S. cerevisiae | 1022 | Cytoplasmic | 1024, 1026, 1028, 1030, 1032, 1034, 1036, 1038, 1040, 1042, |
| | | | | | | | 1044, 1046, 1048, 1050, 1052, 1054, 1056, 1058, 1060, 1062, |
| | | | | | | | 1064, 1066, 1068, 1070, 1072, 1074, 1076, 1078, 1080, 1082, |
| | | | | | | | 1084, 1086, 1088, 1090, 1092, 1094, 1096, 1098, 1100, 1102, |
| | | | | | | | 1104, 1106, 1108, 1110, 1112, 1114, 1116, 1118, 1120, 1122, |
| | | | | | | | 1124, 1126, 1128, 1130, 1132, 1134, 1136, 1138, 1140, 1142, |
| | | | | | | | 1144, 1146, 1148, 1150, 1152 |
| 1 | 11 | CD_OEX_1 | YKR097W | S. cerevisiae | 1158 | Cytoplasmic | 1160, 1162, 1164, 1166, 1168, 1170, 1172, 1174, 1176, 1178, |
| | | | | | | | 1180, 1182, 1184, 1186, 1188, 1190, 1192, 1194, 1196, 1198, |
| | | | | | | | 1200, 1202, 1204, 1206, 1208, 1210, 1212, 1214, 1216, 1218, |
| | | | | | | | 1220, 1222, 1224, 1226, 1228, 1230, 1232, 1234, 1236, 1238, |
| | | | | | | | 1240, 1242, 1244, 1246, 1248, 1250, 1252, 1254, 1256, 1258, |
| | | | | | | | 1260, 1262, 1264, 1266, 1268, 1270, 1272, 1274, 1276, 1278, |
| | | | | | | | 1280, 1282, 1284, 1286, 1288, 1290, 1292, 1294, 1296, 1298, |
| | | | | | | | 1300, 1302, 1304, 1306, 1308, 1310, 1312, 1314, 1316, 1318, |
| | | | | | | | 1320, 1322, 1324, 1326, 1328, 1330, 1332, 1334, 1336 |
| 1 | 12 | CD_OEX_1 | YNR012W | S. cerevisiae | 1353 | Cytoplasmic | 1355, 1357, 1359, 1361, 1363, 1365, 1367, 1369, 1371, 1373, |
| | | | | | | | 1375, 1377, 1379, 1381, 1383, 1385, 1387 |
| 1 | 13 | CD_OEX_1 | YPL133C | S. cerevisiae | 1424 | Plastidic | 1426, 1428, 1430, 1432, 1434, 1436, 1438, 1440, 1442, 1444, |
| | | | | | | | 1446, 1448, 1450, 1452, 1454, 1456, 1458, 1460, 1462, 1464 |

TABLE IIB
Amino acid sequence ID numbers

| | | | | | 5. | | |
|---|---|---|---|---|---|---|---|
| Appli- | 1. | 2. | 3. | 4. | Lead | 6. | 7. |
| cation | Hit | Project | Locus | Organism | SEQ ID | Target | SEQ IDs of Polypeptide Homologs |
| 1 | 1 | CD_OEX_1 | B0312 | E. coli | 64 | Plastidic | 520, 522, 524, 526, 528, 530, 532, 534, 536, 538, 540, 542, 544, |
| | | | | | | | 546, 548, 550, 552, 554, 556, 558, 560, 562, 564, 566, 568, 570, |
| | | | | | | | 572, 574, 576, 578, 580, 582, 584, 586, 588, 590, 592, 594, 596, |
| | | | | | | | 598, 600, 602, 604, 606, 608, 610, 612, 614, 1474 |
| 1 | 2 | CD_OEX_1 | B3182 | E. coli | 624 | Cytoplasmic | — |
| 1 | 3 | CD_OEX_1 | YAL043C-A | S. cerevisiae | 725 | Cytoplasmic | — |
| 1 | 4 | CD_OEX_1 | YBR071W | S. cerevisiae | 729 | Plastidic | — |
| 1 | 5 | CD_OEX_1 | YBR180W | S. cerevisiae | 733 | Cytoplasmic | — |
| 1 | 6 | CD_OEX_1 | YDR284C | S. cerevisiae | 765 | Cytoplasmic | 795, 797, 799, 801, 803, 805, 807, 1478, 1480, 1482 |
| 1 | 7 | CD_OEX_1 | YDR445C | S. cerevisiae | 815 | Cytoplasmic | — |
| 1 | 8 | CD_OEX_1 | YHR047C | S. cerevisiae | 819 | Cytoplasmic | 913, 915, 1486 |
| 1 | 9 | CD_OEX_1 | YHR190W | S. cerevisiae | 926 | Plastidic | 1004, 1006, 1008, 1010, 1012, 1490, 1492 |
| 1 | 10 | CD_OEX_1 | YKL094W | S. cerevisiae | 1022 | Cytoplasmic | 1496 |
| 1 | 11 | CD_OEX_1 | YKR097W | S. cerevisiae | 1158 | Cytoplasmic | 1338, 1340, 1342, 1500 |
| 1 | 12 | CD_OEX_1 | YNR012W | S. cerevisiae | 1353 | Cytoplasmic | 1389, 1391, 1393, 1395, 1397, 1399, 1401, 1403, 1405, 1407, |
| | | | | | | | 1409, 1411 |
| 1 | 13 | CD_OEX_1 | YPL133C | S. cerevisiae | 1424 | Plastidic | — |

TABLE III
Primer nucleic acid sequence ID numbers

| | | | | | 5. | | |
|---|---|---|---|---|---|---|---|
| | 1. | 2. | 3. | 4. | Lead | 6. | 7. |
| Application | Hit | Project | Locus | Organism | SEQ ID | Target | SEQ IDs of Primers |
| 1 | 1 | CD_OEX_1 | B0312 | E. coli | 63 | Plastidic | 615, 616 |
| 1 | 2 | CD_OEX_1 | B3182 | E. coli | 623 | Cytoplasmic | 717, 718 |
| 1 | 3 | CD_OEX_1 | YAL043C-A | S. cerevisiae | 724 | Cytoplasmic | 726, 727 |
| 1 | 4 | CD_OEX_1 | YBR071W | S. cerevisiae | 728 | Plastidic | 730, 731 |
| 1 | 5 | CD_OEX_1 | YBR180W | S. cerevisiae | 732 | Cytoplasmic | 756, 757 |
| 1 | 6 | CD_OEX_1 | YDR284C | S. cerevisiae | 764 | Cytoplasmic | 808, 809 |
| 1 | 7 | CD_OEX_1 | YDR445C | S. cerevisiae | 814 | Cytoplasmic | 816, 817 |
| 1 | 8 | CD_OEX_1 | YHR047C | S. cerevisiae | 818 | Cytoplasmic | 916, 917 |
| 1 | 9 | CD_OEX_1 | YHR190W | S. cerevisiae | 925 | Plastidic | 1013, 1014 |
| 1 | 10 | CD_OEX_1 | YKL094W | S. cerevisiae | 1021 | Cytoplasmic | 1153, 1154 |
| 1 | 11 | CD_OEX_1 | YKR097W | S. cerevisiae | 1157 | Cytoplasmic | 1343, 1344 |
| 1 | 12 | CD_OEX_1 | YNR012W | S. cerevisiae | 1352 | Cytoplasmic | 1412, 1413 |
| 1 | 13 | CD_OEX_1 | YPL133C | S. cerevisiae | 1423 | Plastidic | 1465, 1466 |

TABLE IV
Consensus amino acid sequence ID numbers

| | | | | | 5. | | |
|---|---|---|---|---|---|---|---|
| | 1. | 2. | 3. | 4. | Lead | 6. | 7. |
| Application | Hit | Project | Locus | Organism | SEQ ID | Target | SEQ IDs of Consensus/Pattern Sequences |
| 1 | 1 | CD_OEX_1 | B0312 | E. coli | 64 | Plastidic | 617, 618, 619, 620, 621, 622 |
| 1 | 2 | CD_OEX_1 | B3182 | E. coli | 624 | Cytoplasmic | 719, 720, 721, 722, 723 |
| 1 | 3 | CD_OEX_1 | YAL043C-A | S. cerevisiae | 725 | Cytoplasmic | — |
| 1 | 4 | CD_OEX_1 | YBR071W | S. cerevisiae | 729 | Plastidic | — |
| 1 | 5 | CD_OEX_1 | YBR180W | S. cerevisiae | 733 | Cytoplasmic | 758, 759, 760, 761, 762, 763 |
| 1 | 6 | CD_OEX_1 | YDR284C | S. cerevisiae | 765 | Cytoplasmic | 810, 811, 812, 813 |
| 1 | 7 | CD_OEX_1 | YDR445C | S. cerevisiae | 815 | Cytoplasmic | — |
| 1 | 8 | CD_OEX_1 | YHR047C | S. cerevisiae | 819 | Cytoplasmic | 918, 919, 920, 921, 922, 923, 924 |
| 1 | 9 | CD_OEX_1 | YHR190W | S. cerevisiae | 926 | Plastidic | 1015, 1016, 1017, 1018, 1019, 1020 |
| 1 | 10 | CD_OEX_1 | YKL094W | S. cerevisiae | 1022 | Cytoplasmic | 1155, 1156 |
| 1 | 11 | CD_OEX_1 | YKR097W | S. cerevisiae | 1158 | Cytoplasmic | 1345, 1346, 1347, 1348, 1349, 1350, 1351 |
| 1 | 12 | CD_OEX_1 | YNR012W | S. cerevisiae | 1353 | Cytoplasmic | 1414, 1415, 1416, 1417, 1418, 1419, |
| | | | | | | | 1420, 1421, 1422 |
| 1 | 13 | CD_OEX_1 | YPL133C | S. cerevisiae | 1424 | Plastidic | 1467, 1468, 1469, 1470 |

The application's sequence listing, which the Patent Office published only in electronic form, follows.

SEQUENCE LISTING (1500 sequences)

SEQ ID NO: 1 - DNA, 19 bp, Artificial sequence
  adapter sequence added to gene specific primers for cloning purposes
ggaattccagctgaccacc

SEQ ID NO: 2 - DNA, 20 bp, Artificial sequence
  adapter sequence added to gene specific primers for cloning purposes
gatccccgggaattgccatg

SEQ ID NO: 3 - DNA, 10 bp, Artificial sequence
  adapter sequence added to gene specific primers for cloning purposes
ttgctcttcc

SEQ ID NO: 4 - DNA, 10 bp, Artificial sequence
  adapter sequence added to gene specific primers for cloning purposes
ttgctcttcg

SEQ ID NO: 5 - DNA, 34 bp, Artificial sequence
  Amplification of the targeting sequence of the gene FNR from Spinacia oleracea to generate the S.cerevisiae plastidic targeting vector VC-MME354-1
atagaattcgcataaacttatcttcatagttgcc

SEQ ID NO: 6 - DNA, 27 bp, Artificial sequence
  Amplification of the targeting sequence of the gene FNR from Spinacia oleracea to generate the S.cerevisiae plastidic targeting vector VC-MME354-1
atagaattcagaggcgatctgggccct

SEQ ID NO: 7 - DNA, 36 bp, Artificial sequence
  Amplification of the targeting sequence of the gene FNR from Spinacia oleracea to generate the E.coli plastidic targeting vector VC-MME432-1
atagtttaaacgcataaacttatcttcatagttgcc

SEQ ID NO: 8 - DNA, 34 bp, Artificial sequence
  Amplification of the targeting sequence of the gene FNR from Spinacia oleracea to generate the E.coli plastidic targeting vector VC-MME432-1
ataccatggaagagcaagaggcgatctgggccct

SEQ ID NO: 9 - DNA, 9041 bp, Artificial sequence
  pMTX0270p
gctttgggcggatccggacaatcagtaaattgaacggagaatattattcataaaaatacgatagtaacgggtgatatattcattagaatgaaccgaaaccggcggtaaggatctgagctacacatgctcaggttttttacaacgtgcacaacagaattgaaagcaaatatcatgcgatcataggcgtctcgcatatctcattaaagcagggcatgccggtcgagtcaaatctcggtgacgggcaggaccggacggggcggtaccggcaggctgaagtccagctgccagaaacccacgtcatgccagttcccgtgcttgaagccggccgcccgcagcatgccgcggggggcatatccgagcgcctcgtgcatgcgcacgctcgggtcgttgggcagcccgatgacagcgaccacgctcttgaagccctgtgcctccagggacttcagcaggtgggtgtagagcgtggagcccagtcccgtccgctggtggcggggggagacgtacacggtcgactcggccgtccagtcgtaggcgttgcgtgccttccaggggcccgcgtaggcgatgccggcgacctcgccgtccacctcggcgacgagccagggatagcgctcccgcagacggacgaggtcgtccgtccactcctgcggttcctgcggctcggtacggaagttgaccgtgcttgtctcgatgtagtggttgacgatggtgcagaccgccggcatgtccgcctcggtggcacggcggatgtcggccgggcgtcgttctgggctcatggtagactcgacggatccacgtgtggaagatatgaatttttttgagaaactagataagattaatgaatatcggtgttttggttttttcttgtggccgtctttgtttatattgagatttttcaaatcagtgcgcaagacgtgacgtaagtatccgagtcagtttttatttttctactaatttggtcgaatctagattcgacggtatcgataagctcgcggatccctgaaagcgacgttggatgttaacatctacaaattgccttttcttatcgaccatgtacgtaagcgcttacgtttttggtggacccttgaggaaactggtagctgttgtgggcctgtggtctcaagatggatcattaatttccaccttcacctacgatggggggcatcgcaccggtgagtaatattgtacggctaagagcgaatttggcctgtaggatccctgaaagcgacgttggatgttaacatctacaaattgccttttcttatcgaccatgtacgtaagcgcttacgtttttggtggacccttgaggaaactggtagctgttgtgggcctgtggtctcaagatggatcattaatttccaccttcacctacgatggggggcatcgcaccggtgagtaatattgtacggctaagagcgaatttggcctgtaggatccctgaaagcgacgttggatgttaacatctacaaattgccttttcttatcgaccatgtacgtaagcgcttacgtttttggtggacccttgaggaaactggtagctgttgtgggcctgtggtctcaagatggatcattaatttccaccttcacctacgatggggggcatcgcaccggtgagtaatattgtacggctaagagcgaatttggcctgtaggatccgcgagctggtcaatcccattgcttttgaagcagctcaacattgatctctttctcgatcgagggagatttttcaaatcagtgcgcaagacgtgacgtaagtatccgagtcagtttttatttttctactaatttggtcgtttatttcggcgtgtaggacatggcaaccgggcctgaatttcgcgggtattctgtttctattccaactttttcttgatccgcagccattaacgacttttgaatagatacgctgacacgccaagcctcgctagtcaaaagtgtaccaaacaacgctttacagcaagaacggaatgcgcgtgacgctcgcggtgacgccatttcgccttttcagaaatggataaatagccttgcttcctattatatcttcccaaattaccaatacattacactagcatctgaatttcataaccaatctcgatacaccaaatcgaagatctcccgggttgctcttccatggcaatgattaattaacgaagagcaagagctcgaatttccccgatcgttcaaacatttggcaataaagtttcttaagattgaatcctgttgccggtcttgcgatgattatcatataatttctgttgaattacgttaagcatgtaataattaacatgtaatgcatgacgttatttatgagatgggtttttatgattagagtcccgcaattatacatttaatacgcgatagaaaacaaaatatagcgcgcaaactaggataaattatcgcgcgcggtgtcatctatgttactagatcgggaattggcatgcaagcttggcactggccgtcgttttacaacgtcgtgactgggaaaaccctggcgttacccaacttaatcgccttgcagcacatccccctttcgccagctggcgtaatagcgaagaggcccgcaccgatcgcccttcccaacagttgcgcagcctgaatggcgaatgctagagcagcttgagcttggatcagattgtcgtttcccgccttcagtttaaactatcagtgtttgacaggatatattggcgggtaaacctaagagaaaagagcgtttattagaataatcggatatttaaaagggcgtgaaaaggtttatccgttcgtccatttgtatgtgcatgccaaccacagggttcccctcgggatcaaagtactttgatccaacccctccgctgctatagtgcagtcggcttctgacgttcagtgcagccgtcttctgaaaacgacatgtcgcacaagtcctaagttacgcgacaggctgccgccctgcccttttcctggcgttttcttgtcgcgtgttttagtcgcataaagtagaatacttgcgactagaaccggagacattacgccatgaacaagagcgccgccgctggcctgctgggctatgcccgcgtcagcaccgacgaccaggacttgaccaaccaacgggccgaactgcacgcggccggctgcaccaagctgttttccgagaagatcaccggcaccaggcgcgaccgcccggagctggccaggatgcttgaccacctacgccctggcgacgttgtgacagtgaccaggctagaccgcctggcccgcagcacccgcgacctactggacattgccgagcgcatccaggaggccggcgcgggcctgcgtagcctggcagagccgtgggccgacaccaccacgccggccggccgcatggtgttgaccgtgttcgccggcattgccgagttcgagcgttccctaatcatcgaccgcacccggagcgggcgcgaggccgccaaggcccgaggcgtgaagtttggcccccgccctaccctcaccccggcacagatcgcgcacgcccgcgagctgatcgaccaggaaggccgcaccgtgaaagaggcggctgcactgcttggcgtgcatcgctcgaccctgtaccgcgcacttgagcgcagcgaggaagtgacgcccaccgaggccaggcggcgcggtgccttccgtgaggacgcattgaccgaggccgacgccctggcggccgccgagaatgaacgccaagaggaacaagcatgaaaccgcaccaggacggccaggacgaaccgtttttcattaccgaagagatcgaggcggagatgatcgcggccgggtacgtgttcgagccgcccgcgcacgtctcaaccgtgcggctgcatgaaatcctggccggtttgtctgatgccaagctggcggcctggccggccagcttggccgctgaagaaaccgagcgccgccgtctaaaaaggtgatgtgtatttgagtaaaacagcttgcgtcatgcggtcgctgcgtatatgatgcgatgagtaaataaacaaatacgcaaggggaacgcatgaaggttatcgctgtacttaaccagaaaggcgggtcaggcaagacgaccatcgcaacccatctagcccgcgccctgcaactcgccggggccgatgttctgttagtcgattccgatccccagggcagtgcccgcgattgggcggccgtgcgggaagatcaaccgctaaccgttgtcggcatcgaccgcccgacgattgaccgcgacgtgaaggccatcggccggcgcgacttcgtagtgatcgacggagcgccccaggcggcggacttggctgtgtccgcgatcaaggcagccgacttcgtgctgattccggtgcagccaagcccttacgacatatgggccaccgccgacctggtggagctggttaagcagcgcattgaggtcacggatggaaggctacaagcggcctttgtcgtgtcgcgggcgatcaaaggcacgcgcatcggcggtgaggttgccgaggcgctggccgggtacgagctgcccattcttgagtcccgtatcacgcagcgcgtgagctacccaggcactgccgccgccggcacaaccgttcttgaatcagaacccgagggcgacgctgcccgcgaggtccaggcgctggccgctgaaattaaatcaaaactcatttgagttaatgaggtaaagagaaaatgagcaaaagcacaaacacgctaagtgccggccgtccgagcgcacgcagcagcaaggctgcaacgttggccagcctggcagacacgccagccatgaagcgggtcaactttcagttgccggcggaggatcacaccaagctgaagatgtacgcggtacgccaaggcaagaccattaccgagctgctatctgaatacatcgcgcagctaccagagtaaatgagcaaatgaataaatgagtagatgaattttagcggctaaaggaggcggcatggaaaatcaagaacaaccaggcaccgacgccgtggaatgccccatgtgtggaggaacgggcggttggccaggcgtaagcggctgggttgcctgccggccctgcaatggcactggaacccccaagcccgaggaatcggcgtgagcggtcgcaaaccatccggcccggtacaaatcggcgcggcgctgggtgatgacctggtggagaagttgaaggccgcgcaggccgcccagcggcaacgcatcgaggcagaagcacgccccggtgaatcgtggcaagcggccgctgatcgaatccgcaaagaatcccggcaaccgccggcagccggtgcgccgtcgattaggaagccgcccaagggcgacgagcaaccagattttttcgttccgatgctctatgacgtgggcacccgcgatagtcgcagcatcatggacgtggccgttttccgtctgtcgaagcgtgaccgacgagctggcgaggtgatccgctacgagcttccagacgggcacgtagaggtttccgcagggccggccggcatggccagtgtgtgggattacgacctggtactgatggcggtttcccatctaaccgaatccatgaaccgataccgggaagggaagggagacaagcccggccgcgtgttccgtccacacgttgcggacgtactcaagttctgccggcgagccgatggcggaaagcagaaagacgacctggtagaaacctgcattcggttaaacaccacgcacgttgccatgcagcgtacgaagaaggccaagaacggccgcctggtgacggtatccgagggtgaagccttgattagccgctacaagatcgtaaagagcgaaaccgggcggccggagtacatcgagatcgagctagctgattggatgtaccgcgagatcacagaaggcaagaacccggacgtgctgacggttcaccccgattactttttgatcgatcccggcatcggccgttttctctaccgcctggcacgccgcgccgcaggcaaggcagaagccagatggttgttcaagacgatctacgaacgcagtggcagcgccggagagttcaagaagttctgtttcaccgtgcgcaagctgatcgggtcaaatgacctgccggagtacgatttgaaggaggaggcggggcaggctggcccgatcctagtcatgcgctaccgcaacctgatcgagggcgaagcatccgccggttcctaatgtacggagcagatgctagggcaaattgccctagcaggggaaaaaggtcgaaaaggtctctttcctgtggatagcacgtacattgggaacccaaagccgtacattgggaaccggaacccgtacattgggaacccaaagccgtacattgggaaccggtcacacatgtaagtgactgatataaaagagaaaaaaggcgatttttccgcctaaaactctttaaaacttattaaaactcttaaaacccgcctggcctgtgcataactgtctggccagcgcacagccgaagagctgcaaaaagcgcctacccttcggtcgctgcgctccctacgccccgccgcttcgcgtcggcctatcgcggccgctggccgctcaaaaatggctggcctacggccaggcaatctaccagggcgcggacaagccgcgccgtcgccactcgaccgccggcgcccacatcaaggcaccctgcctcgcgcgtttcggtgatgacggtgaaaacctctgacacatgcagctcccggagacggtcacagcttgtctgtaagcggatgccgggagcagacaagcccgtcagggcgcgtcagcgggtgttggcgggtgtcggggcgcagccatgacccagtcacgtagcgatagcggagtgtatactggcttaactatgcggcatcagagcagattgtactgagagtgcaccatatgcggtgtgaaataccgcacagatgcgtaaggagaaaataccgcatcaggcgctcttccgcttcctcgctcactgactcgctgcgctcggtcgttcggctgcggcgagcggtatcagctcactcaaaggcggtaatacggttatccacagaatcaggggataacgcaggaaagaacatgtgagcaaaaggccagcaaaaggccaggaaccgtaaaaaggccgcgttgctggcgtttttccataggctccgcccccctgacgagcatcacaaaaatcgacgctcaagtcagaggtggcgaaacccgacaggactataaagataccaggcgtttccccctggaagctccctcgtgcgctctcctgttccgaccctgccgcttaccggatacctgtccgcctttctcccttcgggaagcgtggcgctttctcatagctcacgctgtaggtatctcagttcggtgtaggtcgttcgctccaagctgggctgtgtgcacgaaccccccgttcagcccgaccgctgcgccttatccggtaactatcgtcttgagtccaacccggtaagacacgacttatcgccactggcagcagccactggtaacaggattagcagagcgaggtatgtaggcggtgctacagagttcttgaagtggtggcctaactacggctacactagaaggacagtatttggtatctgcgctctgctgaagccagttaccttcggaaaaagagttggtagctcttgatccggcaaacaaaccaccgctggtagcggtggtttttttgtttgcaagcagcagattacgcgcagaaaaaaaggatctcaagaagatcctttgatcttttctacggggtctgacgctcagtggaacgaaaactcacgttaagggattttggtcatgcattctaggtactaaaacaattcatccagtaaaatataatattttattttctcccaatcaggcttgatccccagtaagtcaaaaaatagctcgacatactgttcttccccgatatcctccctgatcgaccggacgcagaaggcaatgtcataccacttgtccgccctgccgcttctcccaagatcaataaagccacttactttgccatctttcacaaagatgttgctgtctcccaggtcgccgtgggaaaagacaagttcctcttcgggcttttccgtctttaaaaaatcatacagctcgcgcggatctttaaatggagtgtcttcttcccagttttcgcaatccacatcggccagatcgttattcagtaagtaatccaattcggctaagcggctgtctaagctattcgtatagggacaatccgatatgtcgatggagtgaaagagcctgatgcactccgcatacagctcgataatcttttcagggctttgttcatcttcatactcttccgagcaaaggacgccatcggcctcactcatgagcagattgctccagccatcatgccgttcaaagtgcaggacctttggaacaggcagctttccttccagccatagcatcatgtccttttcccgttccacatcataggtggtccctttataccggctgtccgtcatttttaaatataggttttcattttctcccaccagcttatataccttagcaggagacattccttccgtatcttttacgcagcggtatttttcgatcagttttttcaattccggtgatattctcattttagccatttattatttccttcctcttttctacagtatttaaagataccccaagaagctaattataacaagacgaactccaattcactgttccttgcattctaaaaccttaaataccagaaaacagctttttcaaagttgttttcaaagttggcgtataacatagtatcgacggagccgattttgaaaccgcggtgatcacaggcagcaacgctctgtcatcgttacaatcaacatgctaccctccgcgagatcatccgtgtttcaaacccggcagcttagttgccgttcttccgaatagcatcggtaacatgagcaaagtctgccgccttacaacggctctcccgctgacgccgtcccggactgatgggctgcctgtatcgagtggtgattttgtgccgagctgccggtcggggagctgttggctggctggtggcaggatatattgtggtgtaaacaaattgacgcttagacaacttaataacacattgcggacgtttttaatgtactgaattaacgccgaattaa

SEQ ID NO: 10 - protein, 62 aa, Acetabularia mediterranea
MASIMMNKSVVLSKECAKPLATPKVTLNKRGFATTIATKNREMMVWQPFNNKMFETFSFLPP

SEQ ID NO: 11 - protein, 90 aa, Arabidopsis thaliana
MAASLQSTATFLQSAKIATAPSRGSSHLRSTQAVGKSFGLETSSARLTCSFQSDFKDFTGKCSDAVKIAGFALATSALVVSGASAEGAPK

SEQ ID NO: 12 - protein, 96 aa, Arabidopsis thaliana
MAQVSRICNGVQNPSLICNLSKSSQRKSPLSVSLKTQQHPRAYPISSSWGLKKSGMTLIGSELRPLKVMSSVSTAEKASEIVLQPIREISGLIKLP

SEQ ID NO: 13 - protein, 100 aa, Arabidopsis thaliana
MAAATTTTTTSSSISFSTKPSPSSSKSPLPISRFSLPFSLNPNKSSSSSRRRGIKSSSPSSISAVLNTTTNVTTTPSPTKPTKPETFISRFAPDQPRKGA

SEQ ID NO: 14 - protein, 46 aa, Arabidopsis thaliana
MITSSLTCSLQALKLSSPFAHGSTPLSSLSKPNSFPNHRMPALVPV

SEQ ID NO: 15 - protein, 93 aa, Arabidopsis thaliana
MASLLGTSSSAIWASPSLSSPSSKPSSSPICFRPGKLFGSKLNAGIQIRPKKNRSRYHVSVMNVATEINSTEQVVGKFDSKKSARPVYPFAAI

SEQ ID NO: 16 - protein, 52 aa, Arabidopsis thaliana
MASTALSSAIVGTSFIRRSPAPISLRSLPSANTQSLFGLKSGTARGGRVVAM

SEQ ID NO: 17 - protein, 39 aa, Arabidopsis thaliana
MAASTMALSSPAFAGKAVNLSPAASEVLGSGRVTNRKTV

SEQ ID NO: 18 - protein, 92 aa, Arabidopsis thaliana
MAAITSATVTIPSFTGLKLAVSSKPKTLSTISRSSSATRAPPKLALKSSLKDFGVIAVATAASIVLAGNAMAMEVLLGSDDGSLAFVPSEFT

SEQ ID NO: 19 - protein, 85 aa, Arabidopsis thaliana
MAAAVSTVGAINRAPLSLNGSGSGAVSAPASTFLGKKVVTVSRFAQSNKKSNGSFKVLAVKEDKQTDGDRWRGLAYDTSDDQIDI

SEQ ID NO: 20 - protein, 54 aa, Arabidopsis thaliana
MKSSMLSSTAWTSPAQATMVAPFTGLKSSASFPVTRKANNDITSITSNGGRVSC

SEQ ID NO: 21 - protein, 91 aa, Arabidopsis thaliana
MAASGTSATFRASVSSAPSSSSQLTHLKSPFKAVKYTPLPSSRSKSSSFSVSCTIAKDPPVLMAAGSDPALWQRPDSFGRFGKFGGKYVPE

SEQ ID NO: 22 - protein, 80 aa, Brassica campestris
MSTTFCSSVCMQATSLAATTRISFQKPALVSTTNLSFNLRRSIPTRFSISCAAKPETVEKVSKIVKKQLSLKDDQKVVAE

SEQ ID NO: 23 - protein, 51 aa, Brassica napus
MATTFSASVSMQATSLATTTRISFQKPVLVSNHGRTNLSFNLSRTRLSISC

SEQ ID NO: 24 - protein, 44 aa, Chlamydomonas reinhardtii
MQALSSRVNIAAKPQRAQRLVVRAEEVKAAPKKEVGPKRGSLVK

SEQ ID NO: 25 - protein, 51 aa, Cucurbita moschata
MAELIQDKESAQSAATAAAASSGYERRNEPAHSRKFLEVRSEEELLSCIKK

SEQ ID NO: 26 - protein, 62 aa, Spinacea oleracea
MSTINGCLTSISPSRTQLKNTSTLRPTFIANSRVNPSSSVPPSLIRNQPVFAAPAPIITPTL

SEQ ID NO: 27 - protein, 75 aa, Spinacea oleracea
MTTAVTAAVSFPSTKTTSLSARCSSVISPDKISYKKVPLYYRNVSATGKMGPIRAQIASDVEAPPPAPAKVEKMS

SEQ ID NO: 28 - protein, 55 aa, Spinacea oleracea
MTTAVTAAVSFPSTKTTSLSARSSSVISPDKISYKKVPLYYRNVSATGKMGPIRA

SEQ ID NO: 29 - DNA, 419 bp, Spinacia oleracea
  5'UTR (1)..(168)
  CDS (166)..(273)
  CDS (351)..(419)
gcataaacttatcttcatagttgccactccaatttgctccttgaatctcctccacccaatacataatccactcctccatcacccacttcactactaaatcaaacttaactctgtttttctctctcctcctttcatttcttattcttccaatcatcgtactccgccatgaccaccgctgtcaccgccgctgtttctttcccctctaccaaaaccacctctctctccgcccgaagctcctccgtcatttcccctgacaaaatcagctacaaaaaggtgattcccaatttcactgtgttttttattaataatttgttattttgatgatgagatgattaatttgggtgctgcaggttcctttgtactacaggaatgtatctgcaactgggaaaatgggacccatcagggcccagatcgcctct

SEQ ID NO: 30 - protein, 59 aa, Spinacia oleracea
MTTAVTAAVSFPSTKTTSLSARSSSVISPDKISYKKVPLYYRNVSATGKMGPIRAQIAS

SEQ ID NO: 31 - DNA, 8659 bp, Artificial sequence
  plasmid pMTX155
agcttggacaatcagtaaattgaacggagaatattattcataaaaatacgatagtaacgggtgatatattcattagaatgaaccgaaaccggcggtaaggatctgagctacacatgctcaggttttttacaacgtgcacaacagaattgaaagcaaatatcatgcgatcataggcgtctcgcatatctcattaaagcagggcatgccggtcgagtcaaatctcggtgacgggcaggaccggacggggcggtaccggcaggctgaagtccagctgccagaaacccacgtcatgccagttcccgtgcttgaagccggccgcccgcagcatgccgcggggggcatatccgagcgcctcgtgcatgcgcacgctcgggtcgttgggcagcccgatgacagcgaccacgctcttgaagccctgtgcctccagggacttcagcaggtgggtgtagagcgtggagcccagtcccgtccgctggtggcggggggagacgtacacggtcgactcggccgtccagtcgtaggcgttgcgtgccttccaggggcccgcgtaggcgatgccggcgacctcgccgtccacctcggcgacgagccagggatagcgctcccgcagacggacgaggtcgtccgtccactcctgcggttcctgcggctcggtacggaagttgaccgtgcttgtctcgatgtagtggttgacgatggtgcagaccgccggcatgtccgcctcggtggcacggcggatgtcggccgggcgtcgttctgggctcatggtagactcgacggatccacgtgtggaagatatgaatttttttgagaaactagataagattaatgaatatcggtgttttggttttttcttgtggccgtctttgtttatattgagatttttcaaatcagtgcgcaagacgtgacgtaagtatccgagtcagtttttatttttctactaatttggtcgaagctttgggcggatcctctagagcagcttgccaacatggtggagcacgacactctcgtctactccaagaatatcaaagatacagtctcagaagaccaaagggctattgagacttttcaacaaagggtaatatcgggaaacctcctcggattccattgcccagctatctgtcacttcatcaaaaggacagtagaaaaggaaggtggcacctacaaatgccatcattgcgataaaggaaaggctatcgttcaagatgcctctgccgacagtggtcccaaagatggacccccacccacgaggagcatcgtggaaaaagaagacgttccaaccacgtcttcaaagcaagtggattgatgtgaacatggtggagcacgacactctcgtctactccaagaatatcaaagatacagtctcagaagaccaaagggctattgagacttttcaacaaagggtaatatcgggaaacctcctcggattccattgcccagctatctgtcacttcatcaaaaggacagtagaaaaggaaggtggcacctacaaatgccatcattgcgataaaggaaaggctatcgttcaagatgcctctgccgacagtggtcccaaagatggacccccacccacgaggagcatcgtggaaaaagaagacgttccaaccacgtcttcaaagcaagtggattgatgtgatatctccactgacgtaagggatgacgcacaatcccactatccttcgcaagacccttcctctatataaggaagttcatttcatttggagaggacagggtaccctggaattccagctgaccaccatggcaattcccggggatcagctcgaatttccccgatcgttcaaacatttggcaataaagtttcttaagattgaatcctgttgccggtcttgcgatgattatcatataatttctgttgaattacgttaagcatgtaataattaacatgtaatgcatgacgttatttatgagatgggtttttatgattagagtcccgcaattatacatttaatacgcgatagaaaacaaaatatagcgcgcaaactaggataaattatcgcgcgcggtgtcatctatgttactagatcgggaattggcatgcaagcttggcactggccgtcgttttacaacgtcgtgactgggaaaaccctggcgttacccaacttaatcgccttgcagcacatccccctttcgccagctggcgtaatagcgaagaggcccgcaccgatcgcccttcccaacagttgcgcagcctgaatggcgaatgctagagcagcttgagcttggatcagattgtcgtttcccgccttcagtttaaactatcagtgtttgacaggatatattggcgggtaaacctaagagaaaagagcgtttattagaataacggatatttaaaagggcgtgaaaaggtttatccgttcgtccatttgtatgtgcatgccaaccacagggttcccctcgggatcaaagtactttgatccaacccctccgctgctatagtgcagtcggcttctgacgttcagtgcagccgtcttctgaaaacgacatgtcgcacaagtcctaagttacgcgacaggctgccgccctgcccttttcctggcgttttcttgtcgcgtgttttagtcgcataaagtagaatacttgcgactagaaccggagacattacgccatgaacaagagcgccgccgctggcctgctgggctatgcccgcgtcagcaccgacgaccaggacttgaccaaccaacgggccgaactgcacgcggccggctgcaccaagctgttttccgagaagatcaccggcaccaggcgcgaccgcccggagctggccaggatgcttgaccacctacgccctggcgacgttgtgacagtgaccaggctagaccgcctggcccgcagcacccgcgacctactggacattgccgagcgcatccaggaggccggcgcgggcctgcgtagcctggcagagccgtgggccgacaccaccacgccggccggccgcatggtgttgaccgtgttcgccggcattgccgagttcgagcgttccctaatcatcgaccgcacccggagcgggcgcgaggccgccaaggcccgaggcgtgaagtttggcccccgccctaccctcaccccggcacagatcgcgcacgcccgcgagctgatcgaccaggaaggccgcaccgtgaaagaggcggctgcactgcttggcgtgcatcgctcgaccctgtaccgcgcacttgagcgcagcgaggaagtgacgcccaccgaggccaggcggcgcggtgccttccgtgaggacgcattgaccgaggccgacgccctggcggccgccgagaatgaacgccaagaggaacaagcatgaaaccgcaccaggacggccaggacgaaccgtttttcattaccgaagagatcgaggcggagatgatcgcggccgggtacgtgttcgagccgcccgcgcacgtctcaaccgtgcggctgcatgaaatcctggccggtttgtctgatgccaagctggcggcctggccggccagcttggccgctgaagaaaccgagcgccgccgtctaaaaaggtgatgtgtatttgagtaaaacagcttgcgtcatgcggtcgctgcgtatatgatgcgatgagtaaataaacaaatacgcaaggggaacgcatgaaggttatcgctgtacttaaccagaaaggcgggtcaggcaagacgaccatcgcaacccatctagcccgcgccctgcaactcgccggggccgatgttctgttagtcgattccgatccccagggcagtgcccgcgattgggcggccgtgcgggaagatcaaccgctaaccgttgtcggcatcgaccgcccgacgattgaccgcgacgtgaaggccatcggccggcgcgacttcgtagtgatcgacggagcgccccaggcggcggacttggctgtgtccgcgatcaaggcagccgacttcgtgctgattccggtgcagccaagcccttacgacatatgggccaccgccgacctggtggagctggttaagcagcgcattgaggtcacggatggaaggctacaagcggcctttgtcgtgtcgcgggcgatcaaaggcacgcgcatcggcggtgaggttgccgaggcgctggccgggtacgagctgcccattcttgagtcccgtatcacgcagcgcgtgagctacccaggcactgccgccgccggcacaaccgttcttgaatcagaacccgagggcgacgctgcccgcgaggtccaggcgctggccgctgaaattaaatcaaaactcatttgagttaatgaggtaaagagaaaatgagcaaaagcacaaacacgctaagtgccggccgtccgagcgcacgcagcagcaaggctgcaacgttggccagcctggcagacacgccagccatgaagcgggtcaactttcagttgccggcggaggatcacaccaagctgaagatgtacgcggtacgccaaggcaagaccattaccgagctgctatctgaatacatcgcgcagctaccagagtaaatgagcaaatgaataaatgagtagatgaattttagcggctaaaggaggcggcatggaaaatcaagaacaaccaggcaccgacgccgtggaatgccccatgtgtggaggaacgggcggttggccaggcgtaagcggctgggttgtctgccggccctgcaatggcactggaacccccaagcccgaggaatcggcgtgacggtcgcaaaccatccggcccggtacaaatcggcgcggcgctgggtgatgacctggtggagaagttgaaggccgcgcaggccgcccagcggcaacgcatcgaggcagaagcacgccccggtgaatcgtggcaagcggccgctgatcgaatccgcaaagaatcccggcaaccgccggcagccggtgcgccgtcgattaggaagccgcccaagggcgacgagcaaccagattttttcgttccgatgctctatgacgtgggcacccgcgatagtcgcagcatcatggacgtggccgttttccgtctgtcgaagcgtgaccgacgagctggcgaggtgatccgctacgagcttccagacgggcacgtagaggtttccgcagggccggccggcatggccagtgtgtgggattacgacctggtactgatggcggtttcccatctaaccgaatccatgaaccgataccgggaagggaagggagacaagcccggccgcgtgttccgtccacacgttgcggacgtactcaagttctgccggcgagccgatggcggaaagcagaaagacgacctggtagaaacctgcattcggttaaacaccacgcacgttgccatgcagcgtacgaagaaggccaagaacggccgcctggtgacggtatccgagggtgaagccttgattagccgctacaagatcgtaaagagcgaaaccgggcggccggagtacatcgagatcgagctagctgattggatgtaccgcgagatcacagaaggcaagaacccggacgtgctgacggttcaccccgattactttttgatcgatcccggcatcggccgttttctctaccgcctggcacgccgcgccgcaggcaaggcagaagccagatggttgttcaagacgatctacgaacgcagtggcagcgccggagagttcaagaagttctgtttcaccgtgcgcaagctgatcgggtcaaatgacctgccggagtacgatttgaaggaggaggcggggcaggctggcccgatcctagtcatgcgctaccgcaacctgatcgagggcgaagcatccgccggttcctaatgtacggagcagatgctagggcaaattgccctagcaggggaaaaaggtcgaaaaggtctctttcctgtggatagcacgtacattgggaacccaaagccgtacattgggaaccggaacccgtacattgggaacccaaagccgtacattgggaaccggtcacacatgtaagtgactgatataaaagagaaaaaaggcgatttttccgcctaaaactctttaaaacttattaaaactcttaaaacccgcctggcctgtgcataactgtctggccagcgcacagccgaagagctgcaaaaagcgcctacccttcggtcgctgcgctccctacgccccgccgcttcgcgtcggcctatcgcggccgctggccgctcaaaaatggctggcctacggccaggcaatctaccagggcgcggacaagccgcgccgtcgccactcgaccgccggcgcccacatcaaggcaccctgcctcgcgcgtttcggtgatgacggtgaaaacctctgacacatgcagctcccggagacggtcacagcttgtctgtaagcggatgccgggagcagacaagcccgtcagggcgcgtcagcgggtgttggcgggtgtcggggcgcagccatgacccagtcacgtagcgatagcggagtgtatactggcttaactatgcggcatcagagcagattgtactgagagtgcaccatatgcggtgtgaaataccgcacagatgcgtaaggagaaaataccgcatcaggcgctcttccgcttcctcgctcactgactcgctgcgctcggtcgttcggctgcggcgagcggtatcagctcactcaaaggcggtaatacggttatccacagaatcaggggataacgcaggaaagaacatgtgagcaaaaggccagcaaaaggccaggaaccgtaaaaaggccgcgttgctggcgtttttccataggctccgcccccctgacgagcatcacaaaaatcgacgctcaagtcagaggtggcgaaacccgacaggactataaagataccaggcgtttccccctggaagctccctcgtgcgctctcctgttccgaccctgccgcttaccggatacctgtccgcctttctcccttcgggaagcgtggcgctttctcatagctcacgctgtaggtatctcagttcggtgtaggtcgttcgctccaagctgggctgtgtgcacgaaccccccgttcagcccgaccgctgcgccttatccggtaactatcgtcttgagtccaacccggtaagacacgacttatcgccactggcagcagccactggtaacaggattagcagagcgaggtatgtaggcggtgctacagagttcttgaagtggtggcctaactacggctacactagaaggacagtatttggtatctgcgctctgctgaagccagttaccttcggaaaaagagttggtagctcttgatccggcaaacaaaccaccgctggtagcggtggtttttttgtttgcaagcagcagattacgcgcagaaaaaaaggatctcaagaagatcctttgatcttttctacggggtctgacgctcagtggaacgaaaactcacgttaagggattttggtcatgcattctaggtactaaaacaattcatccagtaaaatataatattttattttctcccaatcaggcttgatccccagtaagtcaaaaaatagctcgacatactgttcttccccgatatcctccctgatcgaccggacgcagaaggcaatgtcataccacttgtccgccctgccgcttctcccaagatcaataaagccacttactttgccatctttcacaaagatgttgctgtctcccaggtcgccgtgggaaaagacaagttcctcttcgggcttttccgtctttaaaaaatcatacagctcgcgcggatctttaaatggagtgtcttcttcccagttttcgcaatccacatcggccagatcgttattcagtaagtaatccaattcggctaagcggctgtctaagctattcgtatagggacaatccgatatgtcgatggagtgaaagagcctgatgcactccgcatacagctcgataatcttttcagggctttgttcatcttcatactcttccgagcaaaggacgccatcggcctcactcatgagcagattgctccagccatcatgccgttcaaagtgcaggacctttggaacaggcagctttccttccagccatagcatcatgtccttttcccgttccacatcataggtggtccctttataccggctgtccgtcatttttaaatataggttttcattttctcccaccagcttatataccttagcaggagacattccttccgtatcttttacgcagcggtatttttcgatcagttttttcaattccggtgatattctcattttagccatttattatttccttcctcttttctacagtatttaaagataccccaagaagctaattataacaagacgaactccaattcactgttccttgcattctaaaaccttaaataccagaaaacagctttttcaaagttgttttcaaagttggcgtataacatagtatcgacggagccgattttgaaaccgcggtgatcacaggcagcaacgctctgtcatcgttacaatcaacatgctaccctccgcgagatcatccgtgtttcaaacccggcagcttagttgccgttcttccgaatagcatcggtaacatgagcaaagtctgccgccttacaacggctctcccgctgacgccgtcccggactgatgggctgcctgtatcgagtggtgattttgtgccgagctgccggtcggggagctgttggctggctggtggcaggatatattgtggtgtaaacaaattgacgcttagacaacttaataacacattgcggacgtttttaatgtactgaattaacgccgaatta

SEQ ID NO: 32 - DNA, 9469 bp, Artificial sequence
  plasmid VC-MME354-1QCZ
  5'UTR (2130)..(2294)
  transit_peptide (2295)..(2402)
  CDS (2295)..(2402)
  transit_peptide (2480)..(2548)
  CDS (2480)..(2548)
  CDS (2549)..(2566): adapter
agctttgggcggatcctctagaggacaatcagtaaattgaacggagaatattattcataaaaatacgatagtaacgggtgatatattcattagaatgaaccgaaaccggcggtaaggatctgagctacacatgctcaggttttttacaacgtgcacaacagaattgaaagcaaatatcatgcgatcataggcgtctcgcatatctcattaaagcagggcatgccggtcgagtcaaatctcggtgacgggcaggaccggacggggcggtaccggcaggctgaagtccagctgccagaaacccacgtcatgccagttcccgtgcttgaagccggccgcccgcagcatgccgcggggggcatatccgagcgcctcgtgcatgcgcacgctcgggtcgttgggcagcccgatgacagcgaccacgctcttgaagccctgtgcctccagggacttcagcaggtgggtgtagagcgtggagcccagtcccgtccgctggtggcggggggagacgtacacggtcgactcggccgtccagtcgtaggcgttgcgtgccttccaggggcccgcgtaggcgatgccggcgacctcgccgtccacctcggcgacgagccagggatagcgctcccgcagacggacgaggtcgtccgtccactcctgcggttcctgcggctcggtacggaagttgaccgtgcttgtctcgatgtagtggttgacgatggtgcagaccgccggcatgtccgcctcggtggcacggcggatgtcggccgggcgtcgttctgggctcatggtagactcgacggatccacgtgtggaagatatgaatttttttgagaaactagataagattaatgaatatcggtgttttggttttttcttgtggccgtctttgtttatattgagatttttcaaatcagtgcgcaagacgtgacgtaagtatccgagtcagtttttatttttctactaatttggtcgaatctagattcgacggtatcgataagctcgcggatccctgaaagcgacgttggatgttaacatctacaaattgccttttcttatcgaccatgtacgtaagcgcttacgtttttggtggacccttgaggaaactggtagctgttgtgggcctgtggtctcaagatggatcattaatttccaccttcacctacgatggggggcatcgcaccggtgagtaatattgtacggctaagagcgaatttggcctgtaggatccctgaaagcgacgttggatgttaacatctacaaattgccttttcttatcgaccatgtacgtaagcgcttacgtttttggtggacccttgaggaaactggtagctgttgtgggcctgtggtctcaagatggatcattaatttccaccttcacctacgatggggggcatcgcaccggtgagtaatattgtacggctaagagcgaatttggcctgtaggatccctgaaagcgacgttggatgttaacatctacaaattgccttttcttatcgaccatgtacgtaagcgcttacgtttttggtggacccttgaggaaactggtagctgttgtgggcctgtggtctcaagatggatcattaatttccaccttcacctacgatggggggcatcgcaccggtgagtaatattgtacggctaagagcgaatttggcctgtaggatccgcgagctggtcaatcccattgcttttgaagcagctcaacattgatctctttctcgatcgagggagatttttcaaatcagtgcgcaagacgtgacgtaagtatccgagtcagtttttatttttctactaatttggtcgtttatttcggcgtgtaggacatggcaaccgggcctgaatttcgcgggtattctgtttctattccaactttttcttgatccgcagccattaacgacttttgaatagatacgctgacacgccaagcctcgctagtcaaaagtgtaccaaacaacgctttacagcaagaacggaatgcgcgtgacgctcgcggtgacgccatttcgccttttcagaaatggataaatagccttgcttcctattatatcttcccaaattaccaatacattacactagcatctgaatttcataaccaatctcgatacaccaaatcgaagatctccctggaattcgcataaacttatcttcatagttgccactccaatttgctccttgaatctcctccacccaatacataatccactcctccatcacccacttcactactaaatcaaacttaactctgtttttctctctcctcctttcatttcttattcttccaatcatcgtactccgccatgaccaccgctgtcaccgccgctgtttctttcccctctaccaaaaccacctctctctccgcccgaagctcctccgtcatttcccctgacaaaatcagctacaaaaaggtgattcccaatttcactgtgttttttattaataatttgttattttgatgatgagatgattaatttgggtgctgcaggttcctttgtactacaggaatgtatctgcaactgggaaaatgggacccatcagggcccagatcgcctctgaattccagctgaccaccatggcaattcccggggatcagctcgaatttccccgatcgttcaaacatttggcaataaagtttcttaagattgaatcctgttgccggtcttgcgatgattatcatataatttctgttgaattacgttaagcatgtaataattaacatgtaatgcatgacgttatttatgagatgggtttttatgattagagtcccgcaattatacatttaatacgcgatagaaaacaaaatatagcgcgcaaactaggataaattatcgcgcgcggtgtcatctatgttactagatcgggaattggcatgcaagcttggcactggccgtcgttttacaacgtcgtgactgggaaaaccctggcgttacccaacttaatcgccttgcagcacatccccctttcgccagctggcgtaatagcgaagaggcccgcaccgatcgcccttcccaacagttgcgcagcctgaatggcgaatgctagagcagcttgagcttggatcagattgtcgtttcccgccttcagtttaaactatcagtgtttgacaggatatattggcgggtaaacctaagagaaaagagcgtttattagaataatcggatatttaaaagggcgtgaaaaggtttatccgttcgtccatttgtatgtgcatgccaaccacagggttcccctcgggatcaaagtactttgatccaacccctccgctgctatagtgcagtcggcttctgacgttcagtgcagccgtcttctgaaaacgacatgtcgcacaagtcctaagttacgcgacaggctgccgccctgcccttttcctggcgttttcttgtcgcgtgttttagtcgcataaagtagaatacttgcgactagaaccggagacattacgccatgaacaagagcgccgccgctggcctgctgggctatgcccgcgtcagcaccgacgaccaggacttgaccaaccaacgggccgaactgcacgcggccggctgcaccaagctgttttccgagaagatcaccggcaccaggcgcgaccgcccggagctggccaggatgcttgaccacctacgccctggcgacgttgtgacagtgaccaggctagaccgcctggcccgcagcacccgcgacctactggacattgccgagcgcatccaggaggccggcgcgggcctgcgtagcctggcagagccgtgggccgacaccaccacgccggccggccgcatggtgttgaccgtgttcgccggcattgccgagttcgagcgttccctaatcatcgaccgcacccggagcgggcgcgaggccgccaaggcccgaggcgtgaagtttggcccccgccctaccctcaccccggcacagatcgcgcacgcccgcgagctgatcgaccaggaaggccgcaccgtgaaagaggcggctgcactgcttggcgtgcatcgctcgaccctgtaccgcgcacttgagcgcagcgaggaagtgacgcccaccgaggccaggcggcgcggtgccttccgtgaggacgcattgaccgaggccgacgccctggcggccgccgagaatgaacgccaagaggaacaagcatgaaaccgcaccaggacggccaggacgaaccgtttttcattaccgaagagatcgaggcggagatgatcgcggccgggtacgtgttcgagccgcccgcgcacgtctcaaccgtgcggctgcatgaaatcctggccggtttgtctgatgccaagctggcggcctggccggccagcttggccgctgaagaaaccgagcgccgccgtctaaaaaggtgatgtgtatttgagtaaaacagcttgcgtcatgcggtcgctgcgtatatgatgcgatgagtaaataaacaaatacgcaaggggaacgcatgaaggttatcgctgtacttaaccagaaaggcgggtcaggcaagacgaccatcgcaacccatctagcccgcgccctgcaactcgccggggccgatgttctgttagtcgattccgatccccagggcagtgcccgcgattgggcggccgtgcgggaagatcaaccgctaaccgttgtcggcatcgaccgcccgacgattgaccgcgacgtgaaggccatcggccggcgcgacttcgtagtgatcgacggagcgccccaggcggcggacttggctgtgtccgcgatcaaggcagccgacttcgtgctgattccggtgcagccaagcccttacgacatatgggccaccgccgacctggtggagctggttaagcagcgcattgaggtcacggatggaaggctacaagcggcctttgtcgtgtcgcgggcgatcaaaggcacgcgcatcggcggtgaggttgccgaggcgctggccgggtacgagctgcccattcttgagtcccgtatcacgcagcgcgtgagctacccaggcactgccgccgccggcacaaccgttcttgaatcagaacccgagggcgacgctgcccgcgaggtccaggcgctggccgctgaaattaaatcaaaactcatttgagttaatgaggtaaagagaaaatgagcaaaagcacaaacacgctaagtgccggccgtccgagcgcacgcagcagcaaggctgcaacgttggccagcctggcagacacgccagccatgaagcgggtcaactttcagttgccggcggaggatcacaccaagctgaagatgtacgcggtacgccaaggcaagaccattaccgagctgctatctgaatacatcgcgcagctaccagagtaaatgagcaaatgaataaatgagtagatgaattttagcggctaaaggaggcggcatggaaaatcaagaacaaccaggcaccgacgccgtggaatgccccatgtgtggaggaacgggcggttggccaggcgtaagcggctgggttgcctgccggccctgcaatggcactggaacccccaagcccgaggaatcggcgtgagcggtcgcaaaccatccggcccggtacaaatcggcgcggcgctgggtgatgacctggtggagaagttgaaggccgcgcaggccgcccagcggcaacgcatcgaggcagaagcacgccccggtgaatcgtggcaagcggccgctgatcgaatccgcaaagaatcccggcaaccgccggcagccggtgcgccgtcgattaggaagccgcccaagggcgacgagcaaccagattttttcgttccgatgctctatgacgtgggcacccgcgatagtcgcagcatcatggacgtggccgttttccgtctgtcgaagcgtgaccgacgagctggcgaggtgatccgctacgagcttccagacgggcacgtagaggtttccgcagggccggccggcatggccagtgtgtgggattacgacctggtactgatggcggtttcccatctaaccgaatccatgaaccgataccgggaagggaagggagacaagcccggccgcgtgttccgtccacacgttgcggacgtactcaagttctgccggcgagccgatggcggaaagcagaaagacgacctggtagaaacctgcattcggttaaacaccacgcacgttgccatgcagcgtacgaagaaggccaagaacggccgcctggtgacggtatccgagggtgaagccttgattagccgctacaagatcgtaaagagcgaaaccgggcggccggagtacatcgagatcgagctagctgattggatgtaccgcgagatcacagaaggcaagaacccggacgtgctgacggttcaccccgattactttttgatcgatcccggcatcggccgttttctctaccgcctggcacgccgcgccgcaggcaaggcagaagccagatggttgttcaagacgatctacgaacgcagtggcagcgccggagagttcaagaagttctgtttcaccgtgcgcaagctgatcgggtcaaatgacctgccggagtacgatttgaaggaggaggcggggcaggctggcccgatcctagtcatgcgctaccgcaacctgatcgagggcgaagcatccgccggttcctaatgtacggagcagatgctagggcaaattgccctagcaggggaaaaaggtcgaaaaggtctctttcctgtggatagcacgtacattgggaacccaaagccgtacattgggaaccggaacccgtacattgggaacccaaagccgtacattgggaaccggtcacacatgtaagtgactgatataaaagagaaaaaaggcgatttttccgcctaaaactctttaaaacttattaaaactcttaaaacccgcctggcctgtgcataactgtctggccagcgcacagccgaagagctgcaaaaagcgcctacccttcggtcgctgcgctccctacgccccgccgcttcgcgtcggcctatcgcggccgctggccgctcaaaaatggctggcctacggccaggcaatctaccagggcgcggacaagccgcgccgtcgccactcgaccgccggcgcccacatcaaggcaccctgcctcgcgcgtttcggtgatgacggtgaaaacctctgacacatgcagctcccggagacggtcacagcttgtctgtaagcggatgccgggagcagacaagcccgtcagggcgcgtcagcgggtgttggcgggtgtcggggcgcagccatgacccagtcacgtagcgatagcggagtgtatactggcttaactatgcggcatcagagcagattgtactgagagtgcaccatatgcggtgtgaaataccgcacagatgcgtaaggagaaaataccgcatcaggcgctcttccgcttcctcgctcactgactcgctgcgctcggtcgttcggctgcggcgagcggtatcagctcactcaaaggcggtaatacggttatccacagaatcaggggataacgcaggaaagaacatgtgagcaaaaggccagcaaaaggccaggaaccgtaaaaaggccgcgttgctggcgtttttccataggctccgcccccctgacgagcatcacaaaaatcgacgctcaagtcagaggtggcgaaacccgacaggactataaagataccaggcgtttccccctggaagctccctcgtgcgctctcctgttccgaccctgccgcttaccggatacctgtccgcctttctcccttcgggaagcgtggcgctttctcatagctcacgctgtaggtatctcagttcggtgtaggtcgttcgctccaagctgggctgtgtgcacgaaccccccgttcagcccgaccgctgcgccttatccggtaactatcgtcttgagtccaacccggtaagacacgacttatcgccactggcagcagccactggtaacaggattagcagagcgaggtatgtaggcggtgctacagagttcttgaagtggtggcctaactacggctacactagaaggacagtatttggtatctgcgctctgctgaagccagttaccttcggaaaaagagttggtagctcttgatccggcaaacaaaccaccgctggtagcggtggtttttttgtttgcaagcagcagattacgcgcagaaaaaaaggatctcaagaagatcctttgatcttttctacggggtctgacgctcagtggaacgaaaactcacgttaagggattttggtcatgcattctaggtactaaaacaattcatccagtaaaatataatattttattttctcccaatcaggcttgatccccagtaagtcaaaaaatagctcgacatactgttcttccccgatatcctccctgatcgaccggacgcagaaggcaatgtcataccacttgtccgccctgccgcttctcccaagatcaataaagccacttactttgccatctttcacaaagatgttgctgtctcccaggtcgccgtgggaaaagacaagttcctcttcgggcttttccgtctttaaaaaatcatacagctcgcgcggatctttaaatggagtgtcttcttcccagttttcgcaatccacatcggccagatcgttattcagtaagtaatccaattcggctaagcggctgtctaagctattcgtatagggacaatccgatatgtcgatggagtgaaagagcctgatgcactccgcatacagctcgataatcttttcagggctttgttcatcttcatactcttccgagcaaaggacgccatcggcctcactcatgagcagattgctccagccatcatgccgttcaaagtgcaggacctttggaacaggcagctttccttccagccatagcatcatgtccttttcccgttccacatcataggtggtccctttataccggctgtccgtcatttttaaatataggttttcattttctcccaccagcttatataccttagcaggagacattccttccgtatcttttacgcagcggtatttttcgatcagttttttcaattccggtgatattctcattttagccatttattatttccttcctcttttctacagtatttaaagataccccaagaagctaattataacaagacgaactccaattcactgttccttgcattctaaaaccttaaataccagaaaacagctttttcaaagttgttttcaaagttggcgtataacatagtatcgacggagccgattttgaaaccgcggtgatcacaggcagcaacgctctgtcatcgttacaatcaacatgctaccctccgcgagatcatccgtgtttcaaacccggcagcttagttgccgttcttccgaatagcatcggtaacatgagcaaagtctgccgccttacaacggctctcccgctgacgccgtcccggactgatgggctgcctgtatcgagtggtgattttgtgccgagctgccggtcggggagctgttggctggctggtggcaggatatattgtggtgtaaacaaattgacgcttagacaacttaataacacattgcggacgtttttaatgtactgaattaacgccgaatta

SEQ ID NO: 33 - protein, 65 aa, Artificial sequence
  Synthetic Construct
MTTAVTAAVSFPSTKTTSLSARSSSVISPDKISYKKVPLYYRNVSATGKMGPIRAQIASEFQLTT

SEQ ID NO: 34 - DNA, 9129 bp, Artificial sequence
  plasmid VC-MME356-1QCZ
  transit_peptide (2128)..(2208)
  CDS (2128)..(2208)
  CDS (2209)..(2226): adapter
agcttggacaatcagtaaattgaacggagaatattattcataaaaatacgatagtaacgggtgatatattcattagaatgaaccgaaaccggcggtaaggatctgagctacacatgctcaggttttttacaacgtgcacaacagaattgaaagcaaatatcatgcgatcataggcgtctcgcatatctcattaaagcagggcatgccggtcgagtcaaatctcggtgacgggcaggaccggacggggcggtaccggcaggctgaagtccagctgccagaaacccacgtcatgccagttcccgtgcttgaagccggccgcccgcagcatgccgcggggggcatatccgagcgcctcgtgcatgcgcacgctcgggtcgttgggcagcccgatgacagcgaccacgctcttgaagccctgtgcctccagggacttcagcaggtgggtgtagagcgtggagcccagtcccgtccgctggtggcggggggagacgtacacggtcgactcggccgtccagtcgtaggcgttgcgtgccttccaggggcccgcgtaggcgatgccggcgacctcgccgtccacctcggcgacgagccagggatagcgctcccgcagacggacgaggtcgtccgtccactcctgcggttcctgcggctcggtacggaagttgaccgtgcttgtctcgatgtagtggttgacgatggtgcagaccgccggcatgtccgcctcggtggcacggcggatgtcggccgggcgtcgttctgggctcatggtagactcgacggatccacgtgtggaagatatgaatttttttgagaaactagataagattaatgaatatcggtgttttggttttttcttgtggccgtctttgtttatattgagatttttcaaatcagtgcgcaagacgtgacgtaagtatccgagtcagtttttatttttctactaatttggtcgaagctttgggcggatcctctagattcgacggtatcgataagctcgcggatccctgaaagcgacgttggatgttaacatctacaaattgccttttcttatcgaccatgtacgtaagcgcttacgtttttggtggacccttgaggaaactggtagctgttgtgggcctgtggtctcaagatggatcattaatttccaccttcacctacgatggggggcatcgcaccggtgagtaatattgtacggctaagagcgaatttggcctgtaggatccctgaaagcgacgttggatgttaacatctacaaattgccttttcttatcgaccatgtacgtaagcgcttacgtttttggtggacccttgaggaaactggtagctgttgtgggcctgtggtctcaagatggatcattaatttccaccttcacctacgatggggggcatcgcaccggtgagtaatattgtacggctaagagcgaatttggcctgtaggatccctgaaagcgacgttggatgttaacatctacaaattgccttttcttatcgaccatgtacgtaagcgcttacgtttttggtggacccttgaggaaactggtagctgttgtgggcctgtggtctcaagatggatcattaatttccaccttcacctacgatggggggcatcgcaccggtgagtaatattgtacggctaagagcgaatttggcctgtaggatccgcgagctggtcaatcccattgcttttgaagcagctcaacattgatctctttctcgatcgagggagatttttcaaatcagtgcgcaagacgtgacgtaagtatccgagtcagtttttatttttctactaatttggtcgtttatttcggcgtgtaggacatggcaaccgggcctgaatttcgcgggtattctgtttctattccaactttttcttgatccgcagccattaacgacttttgaatagatacgctgacacgccaagcctcgctagtcaaaagtgtaccaaacaacgctttacagcaagaacggaatgcgcgtgacgctcgcggtgacgccatttcgccttttcagaaatggataaatagccttgcttcctattatatcttcccaaattaccaatacattacactagcatctgaatttcataaccaatctcgatacaccaaatcgaagatctccctggaattcatgcagaggtttttctccgccagatcgattctcggttacgccgtcaagacgcggaggaggtctttctcttctcgttcttcggaattccagctgaccaccatggcaattcccggggatcagctcgaatttccccgatcgttcaaacatttggcaataaagtttcttaagattgaatcctgttgccggtcttgcgatgattatcatataatttctgttgaattacgttaagcatgtaataattaacatgtaatgcatgacgttatttatgagatgggtttttatgattagagtcccgcaattatacatttaatacgcgatagaaaacaaaatatagcgcgcaaactaggataaattatcgcgcgcggtgtcatctatgttactagatcgggaattggcatgcaagcttggcactggccgtcgttttacaacgtcgtgactgggaaaaccctggcgttacccaacttaatcgccttgcagcacatccccctttcgccagctggcgtaatagcgaagaggcccgcaccgatcgcccttcccaacagttgcgcagcctgaatggcgaatgctagagcagcttgagcttggatcagattgtcgtttcccgccttcagtttaaactatcagtgtttgacaggatatattggcgggtaaacctaagagaaaagagcgtttattagaataatcggatatttaaaagggcgtgaaaaggtttatccgttcgtccatttgtatgtgcatgccaaccacagggttcccctcgggatcaaagtactttgatccaacccctccgctgctatagtgcagtcggcttctgacgttcagtgcagccgtcttctgaaaacgacatgtcgcacaagtcctaagttacgcgacaggctgccgccctgcccttttcctggcgttttcttgtcgcgtgttttagtcgcataaagtagaatacttgcgactagaaccggagacattacgccatgaacaagagcgccgccgctggcctgctgggctatgcccgcgtcagcaccgacgaccaggacttgaccaaccaacgggccgaactgcacgcggccggctgcaccaagctgttttccgagaagatcaccggcaccaggcgcgaccgcccggagctggccaggatgcttgaccacctacgccctggcgacgttgtgacagtgaccaggctagaccgcctggcccgcagcacccgcgacctactggacattgccgagcgcatccaggaggccggcgcgggcctgcgtagcctggcagagccgtgggccgacaccaccacgccggccggccgcatggtgttgaccgtgttcgccggcattgccgagttcgagcgttccctaatcatcgaccgcacccggagcgggcgcgaggccgccaaggcccgaggcgtgaagtttggcccccgccctaccctcaccccggcacagatcgcgcacgcccgcgagctgatcgaccaggaaggccgcaccgtgaaagaggcggctgcactgcttggcgtgcatcgctcgaccctgtaccgcgcacttgagcgcagcgaggaagtgacgcccaccgaggccaggcggcgcggtgccttccgtgaggacgcattgaccgaggccgacgccctggcggccgccgagaatgaacgccaagaggaacaagcatgaaaccgcaccaggacggccaggacgaaccgtttttcattaccgaagagatcgaggcggagatgatcgcggccgggtacgtgttcgagccgcccgcgcacgtctcaaccgtgcggctgcatgaaatcctggccggtttgtctgatgccaagctggcggcctggccggccagcttggccgctgaagaaaccgagcgccgccgtctaaaaaggtgatgtgtatttgagtaaaacagcttgcgtcatgcggtcgctgcgtatatgatgcgatgagtaaataaacaaatacgcaaggggaacgcatgaaggttatcgctgtacttaaccagaaaggcgggtcaggcaagacgaccatcgcaacccatctagcccgcgccctgcaactcgccggggccgatgttctgttagtcgattccgatccccagggcagtgcccgcgattgggcggccgtgcgggaagatcaaccgctaaccgttgtcggcatcgaccgcccgacgattgaccgcgacgtgaaggccatcggccggcgcgacttcgtagtgatcgacggagcgccccaggcggcggacttggctgtgtccgcgatcaaggcagccgacttcgtgctgattccggtgcagccaagcccttacgacatatgggccaccgccgacctggtggagctggttaagcagcgcattgaggtcacggatggaaggctacaagcggcctttgtcgtgtcgcgggcgatcaaaggcacgcgcatcggcggtgaggttgccgaggcgctggccgggtacgagctgcccattcttgagtcccgtatcacgcagcgcgtgagctacccaggcactgccgccgccggcacaaccgttcttgaatcagaacccgagggcgacgctgcccgcgaggtccaggcgctggccgctgaaattaaatcaaaactcatttgagttaatgaggtaaagagaaaatgagcaaaagcacaaacacgctaagtgccggccgtccgagcgcacgcagcagcaaggctgcaacgttggccagcctggcagacacgccagccatgaagcgggtcaactttcagttgccggcggaggatcacaccaagctgaagatgtacgcggtacgccaaggcaagaccattaccgagctgctatctgaatacatcgcgcagctaccagagtaaatgagcaaatgaataaatgagtagatgaattttagcggctaaaggaggcggcatggaaaatcaagaacaaccaggcaccgacgccgtggaatgccccatgtgtggaggaacgggcggttggccaggcgtaagcggctgggttgcctgccggccctgcaatggcactggaacccccaagcccgaggaatcggcgtgagcggtcgcaaaccatccggcccggtacaaatcggcgcggcgctgggtgatgacctggtggagaagttgaaggccgcgcaggccgcccagcggcaacgcatcgaggcagaagcacgccccggtgaatcgtggcaagcggccgctgatcgaatccgcaaagaatcccggcaaccgccggcagccggtgcgccgtcgattaggaagccgcccaagggcgacgagcaaccagattttttcgttccgatgctctatgacgtgggcacccgcgatagtcgcagcatcatggacgtggccgttttccgtctgtcgaagcgtgaccgacgagctggcgaggtgatccgctacgagcttccagacgggcacgtagaggtttccgcagggccggccggcatggccagtgtgtgggattacgacctggtactgatggcggtttcccatctaaccgaatccatgaaccgataccgggaagggaagggagacaagcccggccgcgtgttccgtccacacgttgcggacgtactcaagttctgccggcgagccgatggcggaaagcagaaagacgacctggtagaaacctgcattcggttaaacaccacgcacgttgccatgcagcgtacgaagaaggccaagaacggccgcctggtgacggtatccgagggtgaagccttgattagccgctacaagatcgtaaagagcgaaaccgggcggccggagtacatcgagatcgagctagctgattggatgtaccgcgagatcacagaaggcaagaacccggacgtgctgacggttcaccccgattactttttgatcgatcccggcatcggccgttttctctaccgcctggcacgccgcgccgcaggcaaggcagaagccagatggttgttcaagacgatctacgaacgcagtggcagcgccggagagttcaagaagttctgtttcaccgtgcgcaagctgatcgggtcaaatgacctgccggagtacgatttgaaggaggaggcggggcaggctggcccgatcctagtcatgcgctaccgcaacctgatcgagggcgaagcatccgccggttcctaatgtacggagcagatgctagggcaaattgccctagcaggggaaaaaggtcgaaaaggtctctttcctgtggatagcacgtacattgggaacccaaagccgtacattgggaaccggaacccgtacattgggaacccaaagccgtacattgggaaccggtcacacatgtaagtgactgatataaaagagaaaaaaggcgatttttccgcctaaaactctttaaaacttattaaaactcttaaaacccgcctggcctgtgcataactgtctggccagcgcacagccgaagagctgcaaaaagcgcctacccttcggtcgctgcgctccctacgccccgccgcttcgcgtcggcctatcgcggccgctggccgctcaaaaatggctggcctacggccaggcaatctaccagggcgcggacaagccgcgccgtcgccactcgaccgccggcgcccacatcaaggcaccctgcctcgcgcgtttcggtgatgacggtgaaaacctctgacacatgcagctcccggagacggtcacagcttgtctgtaagcggatgccgggagcagacaagcccgtcagggcgcgtcagcgggtgttggcgggtgtcggggcgcagccatgacccagtcacgtagcgatagcggagtgtatactggcttaactatgcggcatcagagcagattgtactgagagtgcaccatatgcggtgtgaaataccgcacagatgcgtaaggagaaaataccgcatcaggcgctcttccgcttcctcgctcactgactcgctgcgctcggtcgttcggctgcggcgagcggtatcagctcactcaaaggcggtaatacggttatccacagaatcaggggataacgcaggaaagaacatgtgagcaaaaggccagcaaaaggccaggaaccgtaaaaaggccgcgttgctggcgtttttccataggctccgcccccctgacgagcatcacaaaaatcgacgctcaagtcagaggtggcgaaacccgacaggactataaagataccaggcgtttccccctggaagctccctcgtgcgctctcctgttccgaccctgccgcttaccggatacctgtccgcctttctcccttcgggaagcgtggcgctttctcatagctcacgctgtaggtatctcagttcggtgtaggtcgttcgctccaagctgggctgtgtgcacgaaccccccgttcagcccgaccgctgcgccttatccggtaactatcgtcttgagtccaacccggtaagacacgacttatcgccactggcagcagccactggtaacaggattagcagagcgaggtatgtaggcggtgctacagagttcttgaagtggtggcctaactacggctacactagaaggacagtatttggtatctgcgctctgctgaagccagttaccttcggaaaaagagttggtagctcttgatccggcaaacaaaccaccgctggtagcggtggtttttttgtttgcaagcagcagattacgcgcagaaaaaaaggatctcaagaagatcctttgatcttttctacggggtctgacgctcagtggaacgaaaactcacgttaagggattttggtcatgcattctaggtactaaaacaattcatccagtaaaatataatattttattttctcccaatcaggcttgatccccagtaagtcaaaaaatagctcgacatactgttcttccccgatatcctccctgatcgaccggacgcagaaggcaatgtcataccacttgtccgccctgccgcttctcccaagatcaataaagccacttactttgccatctttcacaaagatgttgctgtctcccaggtcgccgtgggaaaagacaagttcctcttcgggcttttccgtctttaaaaaatcatacagctcgcgcggatctttaaatggagtgtcttcttcccagttttcgcaatccacatcggccagatcgttattcagtaagtaatccaattcggctaagcggctgtctaagctattcgtatagggacaatccgatatgtcgatggagtgaaagagcctgatgcactccgcatacagctcgataatcttttcagggctttgttcatcttcatactcttccgagcaaaggacgccatcggcctcactcatgagcagattgctccagccatcatgccgttcaaagtgcaggacctttggaacaggcagctttccttccagccatagcatcatgtccttttcccgttccacatcataggtggtccctttataccggctgtccgtcatttttaaatataggttttcattttctcccaccagcttatataccttagcaggagacattccttccgtatcttttacgcagcggtatttttcgatcagttttttcaattccggtgatattctcattttagccatttattatttccttcctcttttctacagtatttaaagataccccaagaagctaattataacaagacgaactccaattcactgttccttgcattctaaaaccttaaataccagaaaacagctttttcaaagttgttttcaaagttggcgtataacatagtatcgacggagccgattttgaaaccgcggtgatcacaggcagcaacgctctgtcatcgttacaatcaacatgctaccctccgcgagatcatccgtgtttcaaacccggcagcttagttgccgttcttccgaatagcatcggtaacatgagcaaagtctgccgccttacaacggctctcccgctgacgccgtcccggactgatgggctgcctgtatcgagtggtgattttgtgccgagctgccggtcggggagctgttggctggctggtggcaggatatattgtggtgtaaacaaattgacgcttagacaacttaataacacattgcggacgtttttaatgtactgaattaacgccgaatta

SEQ ID NO: 35 - protein, 33 aa, Artificial sequence
  Synthetic Construct
MQRFFSARSILGYAVKTRRRSFSSRSSEFQLTT

SEQ ID NO: 36 - DNA, 8585 bp, Artificial sequence
  plasmid VC-MME301-1QCZ
agcttggacaatcagtaaattgaacggagaatattattcataaaaatacgatagtaacgggtgatatattcattagaatgaaccgaaaccggcggtaaggatctgagctacacatgctcaggttttttacaacgtgcacaacagaattgaaagcaaatatcatgcgatcataggcgtctcgcatatctcattaaagcagggcatgccggtcgagtcaaatctcggtgacgggcaggaccggacggggcggtaccggcaggctgaagtccagctgccagaaacccacgtcatgccagttcccgtgcttgaagccggccgcccgcagcatgccgcggggggcatatccgagcgcctcgtgcatgcgcacgctcgggtcgttgggcagcccgatgacagcgaccacgctcttgaagccctgtgcctccagggacttcagcaggtgggtgtagagcgtggagcccagtcccgtccgctggtggcggggggagacgtacacggtcgactcggccgtccagtcgtaggcgttgcgtgccttccaggggcccgcgtaggcgatgccggcgacctcgccgtccacctcggcgacgagccagggatagcgctcccgcagacggacgaggtcgtccgtccactcctgcggttcctgcggctcggtacggaagttgaccgtgcttgtctcgatgtagtggttgacgatggtgcagaccgccggcatgtccgcctcggtggcacggcggatgtcggccgggcgtcgttctgggctcatggtagactcgacggatccacgtgtggaagatatgaatttttttgagaaactagataagattaatgaatatcggtgttttggttttttcttgtggccgtctttgtttatattgagatttttcaaatcagtgcgcaagacgtgacgtaagtatccgagtcagtttttatttttctactaatttggtcgaagctttgggcggatcctctagactgcagcaaatttacacattgccactaaacgtctaaacccttgtaatttgtttttgttttactatgtgtgttatgtatttgatttgcgataaatttttatatttggtactaaatttataacaccttttatgctaacgtttgccaacacttagcaatttgcaagttgattaattgattctaaattatttttgtcttctaaatacatatactaatcaactggaaatgtaaatatttgctaatatttctactataggagaattaaagtgagtgaatatggtaccacaaggtttggagatttaattgttgcaatgctgcatggatggcatatacaccaaacattcaataattcttgaggataataatggtaccacacaagatttgaggtgcatgaacgtcacgtggacaaaaggtttagtaatttttcaagacaacaatgttaccacacacaagttttgaggtgcatgcatggatgccctgtggaaagtttaaaaatattttggaaatgatttgcatggaagccatgtgtaaaaccatgacatccacttggaggatgcaataatgaagaaaactacaaatttacatgcaactagttatgcatgtagtctatataatgaggattttgcaatactttcattcatacacactcactaagttttacacgattataatttcttcataccattaattaagaattccagctgaccaccatggcaattcccggggatcagctcgaatttccccgatcgttcaaacatttggcaataaagtttcttaagattgaatcctgttgccggtcttgcgatgattatcatataatttctgttgaattacgttaagcatgtaataattaacatgtaatgcatgacgttatttatgagatgggtttttatgattagagtcccgcaattatacatttaatacgcgatagaaaacaaaatatagcgcgcaaactaggataaattatcgcgcgcggtgtcatctatgttactagatcgggaattggcatgcaagcttggcactggccgtcgttttacaacgtcgtgactgggaaaaccctggcgttacccaacttaatcgccttgcagcacatccccctttcgccagctggcgtaatagcgaagaggcccgcaccgatcgcccttcccaacagttgcgcagcctgaatggcgaatgctagagcagcttgagcttggatcagattgtcgtttcccgccttcagtttaaactatcagtgtttgacaggatatattggcgggtaaacctaagagaaaagagcgtttattagaataatcggatatttaaaagggcgtgaaaaggtttatccgttcgtccatttgtatgtgcatgccaaccacagggttcccctcgggatcaaagtactttgatccaacccctccgctgctatagtgcagtcggcttctgacgttcagtgcagccgtcttctgaaaacgacatgtcgcacaagtcctaagttacgcgacaggctgccgccctgcccttttcctggcgttttcttgtcgcgtgttttagtcgcataaagtagaatacttgcgactagaaccggagacattacgccatgaacaagagcgccgccgctggcctgctgggctatgcccgcgtcagcaccgacgaccaggacttgaccaaccaacgggccgaactgcacgcggccggctgcaccaagctgttttccgagaagatcaccggcaccaggcgcgaccgcccggagctggccaggatgcttgaccacctacgccctggcgacgttgtgacagtgaccaggctagaccgcctggcccgcagcacccgcgacctactggacattgccgagcgcatccaggaggccggcgcgggcctgcgtagcctggcagagccgtgggccgacaccaccacgccggccggccgcatggtgttgaccgtgttcgccggcattgccgagttcgagcgttccctaatcatcgaccgcacccggagcgggcgcgaggccgccaaggcccgaggcgtgaagtttggcccccgccctaccctcaccccggcacagatcgcgcacgcccgcgagctgatcgaccaggaaggccgcaccgtgaaagaggcggctgcactgcttggcgtgcatcgctcgaccctgtaccgcgcacttgagcgcagcgaggaagtgacgcccaccgaggccaggcggcgcggtgccttccgtgaggacgcattgaccgaggccgacgccctggcggccgccgagaatgaacgccaagaggaacaagcatgaaaccgcaccaggacggccaggacgaaccgtttttcattaccgaagagatcgaggcggagatgatcgcggccgggtacgtgttcgagccgcccgcgcacgtctcaaccgtgcggctgcatgaaatcctggccggtttgtctgatgccaagctggcggcctggccggccagcttggccgctgaagaaaccgagcgccgccgtctaaaaaggtgatgtgtatttgagtaaaacagcttgcgtcatgcggtcgctgcgtatatgatgcgatgagtaaataaacaaatacgcaaggggaacgcatgaaggttatcgctgtacttaaccagaaaggcgggtcaggcaagacgaccatcgcaacccatctagcccgcgccctgcaactcgccggggccgatgttctgttagtcgattccgatccccagggcagtgcccgcgattgggcggccgtgcgggaagatcaaccgctaaccgttgtcggcatcgaccgcccgacgattgaccgcgacgtgaaggccatcggccggcgcgacttcgtagtgatcgacggagcgccccaggcggcggacttggctgtgtccgcgatcaaggcagccgacttcgtgctgattccggtgcagccaagcccttacgacatatgggccaccgccgacctggtggagctggttaagcagcgcattgaggtcacggatggaaggctacaagcggcctttgtcgtgtcgcgggcgatcaaaggcacgcgcatcggcggtgaggttgccgaggcgctggccgggtacgagctgcccattcttgagtcccgtatcacgcagcgcgtgagctacccaggcactgccgccgccggcacaaccgttcttgaatcagaacccgagggcgacgctgcccgcgaggtccaggcgctggccgctgaaattaaatcaaaactcatttgagttaatgaggtaaagagaaaatgagcaaaagcacaaacacgctaagtgccggccgtccgagcgcacgcagcagcaaggctgcaacgttggccagcctggcagacacgccagccatgaagcgggtcaactttcagttgccggcggaggatcacaccaagctgaagatgtacgcggtacgccaaggcaagaccattaccgagctgctatctgaatacatcgcgcagctaccagagtaaatgagcaaatgaataaatgagtagatgaattttagcggctaaaggaggcggcatggaaaatcaagaacaaccaggcaccgacgccgtggaatgccccatgtgtggaggaacgggcggttggccaggcgtaagcggctgggttgcctgccggccctgcaatggcactggaacccccaagcccgaggaatcggcgtgagcggtcgcaaaccatccggcccggtacaaatcggcgcggcgctgggtgatgacctggtggagaagttgaaggccgcgcaggccgcccagcggcaacgcatcgaggcagaagcacgccccggtgaatcgtggcaagcggccgctgatcgaatccgcaaagaatcccggcaaccgccggcagccggtgcgccgtcgattaggaagccgcccaagggcgacgagcaaccagattttttcgttccgatgctctatgacgtgggcacccgcgatagtcgcagcatcatggacgtggccgttttccgtctgtcgaagcgtgaccgacgagctggcgaggtgatccgctacgagcttccagacgggcacgtagaggtttccgcagggccggccggcatggccagtgtgtgggattacgacctggtactgatggcggtttcccatctaaccgaatccatgaaccgataccgggaagggaagggagacaagcccggccgcgtgttccgtccacacgttgcggacgtactcaagttctgccggcgagccgatggcggaaagcagaaagacgacctggtagaaacctgcattcggttaaacaccacgcacgttgccatgcagcgtacgaagaaggccaagaacggccgcctggtgacggtatccgagggtgaagccttgattagccgctacaagatcgtaaagagcgaaaccgggcggccggagtacatcgagatcgagctagctgattggatgtaccgcgagatcacagaaggcaagaacccggacgtgctgacggttcaccccgattactttttgatcgatcccggcatcggccgttttctctaccgcctggcacgccgcgccgcaggcaaggcagaagccagatggttgttcaagacgatctacgaacgcagtggcagcgccggagagttcaagaagttctgtttcaccgtgcgcaagctgatcgggtcaaatgacctgccggagtacgatttgaaggaggaggcggggcaggctggcccgatcctagtcatgcgctaccgcaacctgatcgagggcgaagcatccgccggttcctaatgtacggagcagatgctagggcaaattgccctagcaggggaaaaaggtcgaaaaggtctctttcctgtggatagcacgtacattgggaacccaaagccgtacattgggaaccggaacccgtacattgggaacccaaagccgtacattgggaaccggtcacacatgtaagtgactgatataaaagagaaaaaaggcgatttttccgcctaaaactctttaaaacttattaaaactcttaaaacccgcctggcctgtgcataactgtctggccagcgcacagccgaagagctgcaaaaagcgcctacccttcggtcgctgcgctccctacgccccgccgcttcgcgtcggcctatcgcggccgctggccgctcaaaaatggctggcctacggccaggcaatctaccagggcgcggacaagccgcgccgtcgccactcgaccgccggcgcccacatcaaggcaccctgcctcgcgcgtttcggtgatgacggtgaaaacctctgacacatgcagctcccggagacggtcacagcttgtctgtaagcggatgccgggagcagacaagcccgtcagggcgcgtcagcgggtgttggcgggtgtcggggcgcagccatgacccagtcacgtagcgatagcggagtgtatactggcttaactatgcggcatcagagcagattgtactgagagtgcaccatatgcggtgtgaaataccgcacagatgcgtaaggagaaaataccgcatcaggcgctcttccgcttcctcgctcactgactcgctgcgctcggtcgttcggctgcggcgagcggtatcagctcactcaaaggcggtaatacggttatccacagaatcaggggataacgcaggaaagaacatgtgagcaaaaggccagcaaaaggccaggaaccgtaaaaaggccgcgttgctggcgtttttccataggctccgcccccctgacgagcatcacaaaaatcgacgctcaagtcagaggtggcgaaacccgacaggactataaagataccaggcgtttccccctggaagctccctcgtgcgctctcctgttccgaccctgccgcttaccggatacctgtccgcctttctcccttcgggaagcgtggcgctttctcatagctcacgctgtaggtatctcagttcggtgtaggtcgttcgctccaagctgggctgtgtgcacgaaccccccgttcagcccgaccgctgcgccttatccggtaactatcgtcttgagtccaacccggtaagacacgacttatcgccactggcagcagccactggtaacaggattagcagagcgaggtatgtaggcggtgctacagagttcttgaagtggtggcctaactacggctacactagaaggacagtatttggtatctgcgctctgctgaagccagttaccttcggaaaaagagttggtagctcttgatccggcaaacaaaccaccgctggtagcggtggtttttttgtttgcaagcagcagattacgcgcagaaaaaaaggatctcaagaagatcctttgatcttttctacggggtctgacgctcagtggaacgaaaactcacgttaagggattttggtcatgcattctaggtactaaaacaattcatccagtaaaatataatattttattttctcccaatcaggcttgatccccagtaagtcaaaaaatagctcgacatactgttcttccccgatatcctccctgatcgaccggacgcagaaggcaatgtcataccacttgtccgccctgccgcttctcccaagatcaataaagccacttactttgccatctttcacaaagatgttgctgtctcccaggtcgccgtgggaaaagacaagttcctcttcgggcttttccgtctttaaaaaatcatacagctcgcgcggatctttaaatggagtgtcttcttcccagttttcgcaatccacatcggccagatcgttattcagtaagtaatccaattcggctaagcggctgtctaagctattcgtatagggacaatccgatatgtcgatggagtgaaagagcctgatgcactccgcatacagctcgataatcttttcagggctttgttcatcttcatactcttccgagcaaaggacgccatcggcctcactcatgagcagattgctccagccatcatgccgttcaaagtgcaggacctttggaacaggcagctttccttccagccatagcatcatgtccttttcccgttccacatcataggtggtccctttataccggctgtccgtcatttttaaatataggttttcattttctcccaccagcttatataccttagcaggagacattccttccgtatcttttacgcagcggtatttttcgatcagttttttcaattccggtgatattctcattttagccatttattatttccttcctcttttctacagtatttaaagataccccaagaagctaattataacaagacgaactccaattcactgttccttgcattctaaaaccttaaataccagaaaacagctttttcaaagttgttttcaaagttggcgtataacatagtatcgacggagccgattttgaaaccgcggtgatcacaggcagcaacgctctgtcatcgttacaatcaacatgctaccctccgcgagatcatccgtgtttcaaacccggcagcttagttgccgttcttccgaatagcatcggtaacatgagcaaagtctgccgccttacaacggctctcccgctgacgccgtcccggactgatgggctgcctgtatcgagtggtgattttgtgccgagctgccggtcggggagctgttggctggctggtggcaggatatattgtggtgtaaacaaattgacgcttagacaacttaataacacattgcggacgtttttaatgtactgaattaacgccgaatta

SEQ ID NO: 37 - DNA, 9010 bp, Artificial sequence
  plasmid pMTX461korrp
  5'UTR (1673)..(1837)
  transit_peptide (1838)..(1945)
  CDS (1838)..(1945)
  transit_peptide (2023)..(2091)
  CDS (2023)..(2091)
  CDS (2092)..(2109): adapter
agctttgggcggatcctctagaggacaatcagtaaattgaacggagaatattattcataaaaatacgatagtaacgggtgatatattcattagaatgaaccgaaaccggcggtaaggatctgagctacacatgctcaggttttttacaacgtgcacaacagaattgaaagcaaatatcatgcgatcataggcgtctcgcatatctcattaaagcagggcatgccggtcgagtcaaatctcggtgacgggcaggaccggacggggcggtaccggcaggctgaagtccagctgccagaaacccacgtcatgccagttcccgtgcttgaagccggccgcccgcagcatgccgcggggggcatatccgagcgcctcgtgcatgcgcacgctcgggtcgttgggcagcccgatgacagcgaccacgctcttgaagccctgtgcctccagggacttcagcaggtgggtgtagagcgtggagcccagtcccgtccgctggtggcggggggagacgtacacggtcgactcggccgtccagtcgtaggcgttgcgtgccttccaggggcccgcgtaggcgatgccggcgacctcgccgtccacctcggcgacgagccagggatagcgctcccgcagacggacgaggtcgtccgtccactcctgcggttcctgcggctcggtacggaagttgaccgtgcttgtctcgatgtagtggttgacgatggtgcagaccgccggcatgtccgcctcggtggcacggcggatgtcggccgggcgtcgttctgggctcatggtagactcgacggatccacgtgtggaagatatgaatttttttgagaaactagataagattaatgaatatcggtgttttggttttttcttgtggccgtctttgtttatattgagatttttcaaatcagtgcgcaagacgtgacgtaagtatccgagtcagtttttatttttctactaatttggtcgaatctagactgcagcaaatttacacattgccactaaacgtctaaacccttgtaatttgtttttgttttactatgtgtgttatgtatttgatttgcgataaatttttatatttggtactaaatttataacaccttttatgctaacgtttgccaacacttagcaatttgcaagttgattaattgattctaaattatttttgtcttctaaatacatatactaatcaactggaaatgtaaatatttgctaatatttctactataggagaattaaagtgagtgaatatggtaccacaaggtttggagatttaattgttgcaatgctgcatggatggcatatacaccaaacattcaataattcttgaggataataatggtaccacacaagatttgaggtgcatgaacgtcacgtggacaaaaggtttagtaatttttcaagacaacaatgttaccacacacaagttttgaggtgcatgcatggatgccctgtggaaagtttaaaaatattttggaaatgatttgcatggaagccatgtgtaaaaccatgacatccacttggaggatgcaataatgaagaaaactacaaatttacatgcaactagttatgcatgtagtctatataatgaggattttgcaatactttcattcatacacactcactaagttttacacgattataatttcttcataccattaattaagaattcgcataaacttatcttcatagttgccactccaatttgctccttgaatctcctccacccaatacataatccactcctccatcacccacttcactactaaatcaaacttaactctgtttttctctctcctcctttcatttcttattcttccaatcatcgtactccgccatgaccaccgctgtcaccgccgctgtttctttcccctctaccaaaaccacctctctctccgcccgaagctcctccgtcatttcccctgacaaaatcagctacaaaaaggtgattcccaatttcactgtgttttttattaataatttgttattttgatgatgagatgattaatttgggtgctgcaggttcctttgtactacaggaatgtatctgcaactgggaaaatgggacccatcagggcccagatcgcctctgaattccagctgaccaccatggcaattcccggggatcagctcgaatttccccgatcgttcaaacatttggcaataaagtttcttaagattgaatcctgttgccggtcttgcgatgattatcatataatttctgttgaattacgttaagcatgtaataattaacatgtaatgcatgacgttatttatgagatgggtttttatgattagagtcccgcaattatacatttaatacgcgatagaaaacaaaatatagcgcgcaaactaggataaattatcgcgcgcggtgtcatctatgttactagatcgggaattggcatgcaagcttggcactggccgtcgttttacaacgtcgtgactgggaaaaccctggcgttacccaacttaatcgccttgcagcacatccccctttcgccagctggcgtaatagcgaagaggcccgcaccgatcgcccttcccaacagttgcgcagcctgaatggcgaatgctagagcagcttgagcttggatcagattgtcgtttcccgccttcagtttaaactatcagtgtttgacaggatatattggcgggtaaacctaagagaaaagagcgtttattagaataacggatatttaaaagggcgtgaaaaggtttatccgttcgtccatttgtatgtgcatgccaaccacagggttcccctcgggatcaaagtactttgatccaacccctccgctgctatagtgcagtcggcttctgacgttcagtgcagccgtcttctgaaaacgacatgtcgcacaagtcctaagttacgcgacaggctgccgccctgcccttttcctggcgttttcttgtcgcgtgttttagtcgcataaagtagaatacttgcgactagaaccggagacattacgccatgaacaagagcgccgccgctggcctgctgggctatgcccgcgtcagcaccgacgaccaggacttgaccaaccaacgggccgaactgcacgcggccggctgcaccaagctgttttccgagaagatcaccggcaccaggcgcgaccgcccggagctggccaggatgcttgaccacctacgccctggcgacgttgtgacagtgaccaggctagaccgcctggcccgcagcacccgcgacctactggacattgccgagcgcatccaggaggccggcgcgggcctgcgtagcctggcagagccgtgggccgacaccaccacgccggccggccgcatggtgttgaccgtgttcgccggcattgccgagttcgagcgttccctaatcatcgaccgcacccggagcgggcgcgaggccgccaaggcccgaggcgtgaagtttggcccccgccctaccctcaccccggcacagatcgcgcacgcccgcgagctgatcgaccaggaaggccgcaccgtgaaagaggcggctgcactgcttggcgtgcatcgctcgaccctgtaccgcgcacttgagcgcagcgaggaagtgacgcccaccgaggccaggcggcgcggtgccttccgtgaggacgcattgaccgaggccgacgccctggcggccgccgagaatgaacgccaagaggaacaagcatgaaaccgcaccaggacggccaggacgaaccgtttttcattaccgaagagatcgaggcggagatgatcgcggccgggtacgtgttcgagccgcccgcgcacgtctcaaccgtgcggctgcatgaaatcctggccggtttgtctgatgccaagctggcggcctggccggccagcttggccgctgaagaaaccgagcgccgccgtctaaaaaggtgatgtgtatttgagtaaaacagcttgcgtcatgcggtcgctgcgtatatgatgcgatgagtaaataaacaaatacgcaaggggaacgcatgaaggttatcgctgtacttaaccagaaaggcgggtcaggcaagacgaccatcgcaacccatctagcccgcgccctgcaactcgccggggccgatgttctgttagtcgattccgatccccagggcagtgcccgcgattgggcggccgtgcgggaagatcaaccgctaaccgttgtcggcatcgaccgcccgacgattgaccgcgacgtgaaggccatcggccggcgcgacttcgtagtgatcgacggagcgccccaggcggcggacttggctgtgtccgcgatcaaggcagccgacttcgtgctgattccggtgcagccaagcccttacgacatatgggccaccgccgacctggtggagctggttaagcagcgcattgaggtcacggatggaaggctacaagcggcctttgtcgtgtcgcgggcgatcaaaggcacgcgcatcggcggtgaggttgccgaggcgctggccgggtacgagctgcccattcttgagtcccgtatcacgcagcgcgtgagctacccaggcactgccgccgccggcacaaccgttcttgaatcagaacccgagggcgacgctgcccgcgaggtccaggcgctggccgctgaaattaaatcaaaactcatttgagttaatgaggtaaagagaaaatgagcaaaagcacaaacacgctaagtgccggccgtccgagcgcacgcagcagcaaggctgcaacgttggccagcctggcagacacgccagccatgaagcgggtcaactttcagttgccggcggaggatcacaccaagctgaagatgtacgcggtacgccaaggcaagaccattaccgagctgctatctgaatacatcgcgcagctaccagagtaaatgagcaaatgaataaatgagtagatgaattttagcggctaaaggaggcggcatggaaaatcaagaacaaccaggcaccgacgccgtggaatgccccatgtgtggaggaacgggcggttggccaggcgtaagcggctgggttgtctgccggccctgcaatggcactggaacccccaagcccgaggaatcggcgtgacggtcgcaaaccatccggcccggtacaaatcggcgcggcgctgggtgatgacctggtggagaagttgaaggccgcgcaggccgcccagcggcaacgcatcgaggcagaagcacgccccggtgaatcgtggcaagcggccgctgatcgaatccgcaaagaatcccggcaaccgccggcagccggtgcgccgtcgattaggaagccgcccaagggcgacgagcaaccagattttttcgttccgatgctctatgacgtgggcacccgcgatagtcgcagcatcatggacgtggccgttttccgtctgtcgaagcgtgaccgacgagctggcgaggtgatccgctacgagcttccagacgggcacgtagaggtttccgcagggccggccggcatggccagtgtgtgggattacgacctggtactgatggcggtttcccatctaaccgaatccatgaaccgataccgggaagggaagggagacaagcccggccgcgtgttccgtccacacgttgcggacgtactcaagttctgccggcgagccgatggcggaaagcagaaagacgacctggtagaaacctgcattcggttaaacaccacgcacgttgccatgcagcgtacgaagaaggccaagaacggccgcctggtgacggtatccgagggtgaagccttgattagccgctacaagatcgtaaagagcgaaaccgggcggccggagtacatcgagatcgagctagctgattggatgtaccgcgagatcacagaaggcaagaacccggacgtgctgacggttcaccccgattactttttgatcgatcccggcatcggccgttttctctaccgcctggcacgccgcgccgcaggcaaggcagaagccagatggttgttcaagacgatctacgaacgcagtggcagcgccggagagttcaagaagttctgtttcaccgtgcgcaagctgatcgggtcaaatgacctgccggagtacgatttgaaggaggaggcggggcaggctggcccgatcctagtcatgcgctaccgcaacctgatcgagggcgaagcatccgccggttcctaatgtacggagcagatgctagggcaaattgccctagcaggggaaaaaggtcgaaaaggtctctttcctgtggatagcacgtacattgggaacccaaagccgtacattgggaaccggaacccgtacattgggaacccaaagccgtacattgggaaccggtcacacatgtaagtgactgatataaaagagaaaaaaggcgatttttccgcctaaaactctttaaaacttattaaaactcttaaaacccgcctggcctgtgcataactgtctggccagcgcacagccgaagagctgcaaaaagcgcctacccttcggtcgctgcgctccctacgccccgccgcttcgcgtcggcctatcgcggccgctggccgctcaaaaatggctggcctacggccaggcaatctaccagggcgcggacaagccgcgccgtcgccactcgaccgccggcgcccacatcaaggcaccctgcctcgcgcgtttcggtgatgacggtgaaaacctctgacacatgcagctcccggagacggtcacagcttgtctgtaagcggatgccgggagcagacaagcccgtcagggcgcgtcagcgggtgttggcgggtgtcggggcgcagccatgacccagtcacgtagcgatagcggagtgtatactggcttaactatgcggcatcagagcagattgtactgagagtgcaccatatgcggtgtgaaataccgcacagatgcgtaaggagaaaataccgcatcaggcgctcttccgcttcctcgctcactgactcgctgcgctcggtcgttcggctgcggcgagcggtatcagctcactcaaaggcggtaatacggttatccacagaatcaggggataacgcaggaaagaacatgtgagcaaaaggccagcaaaaggccaggaaccgtaaaaaggccgcgttgctggcgtttttccataggctccgcccccctgacgagcatcacaaaaatcgacgctcaagtcagaggtggcgaaacccgacaggactataaagataccaggcgtttccccctggaagctccctcgtgcgctctcctgttccgaccctgccgcttaccggatacctgtccgcctttctcccttcgggaagcgtggcgctttctcatagctcacgctgtaggtatctcagttcggtgtaggtcgttcgctccaagctgggctgtgtgcacgaaccccccgttcagcccgaccgctgcgccttatccggtaactatcgtcttgagtccaacccggtaagacacgacttatcgccactggcagcagccactggtaacaggattagcagagcgaggtatgtaggcggtgctacagagttcttgaagtggtggcctaactacggctacactagaaggacagtatttggtatctgcgctctgctgaagccagttaccttcggaaaaagagttggtagctcttgatccggcaaacaaaccaccgctggtagcggtggtttttttgtttgcaagcagcagattacgcgcagaaaaaaaggatctcaagaagatcctttgatcttttctacggggtctgacgctcagtggaacgaaaactcacgttaagggattttggtcatgcattctaggtactaaaacaattcatccagtaaaatataatattttattttctcccaatcaggcttgatccccagtaagtcaaaaaatagctcgacatactgttcttccccgatatcctccctgatcgaccggacgcagaaggcaatgtcataccacttgtccgccctgccgcttctcccaagatcaataaagccacttactttgccatctttcacaaagatgttgctgtctcccaggtcgccgtgggaaaagacaagttcctcttcgggcttttccgtctttaaaaaatcatacagctcgcgcggatctttaaatggagtgtcttcttcccagttttcgcaatccacatcggccagatcgttattcagtaagtaatccaattcggctaagcggctgtctaagctattcgtatagggacaatccgatatgtcgatggagtgaaagagcctgatgcactccgcatacagctcgataatcttttcagggctttgttcatcttcatactcttccgagcaaaggacgccatcggcctcactcatgagcagattgctccagccatcatgccgttcaaagtgcaggacctttggaacaggcagctttccttccagccatagcatcatgtccttttcccgttccacatcataggtggtccctttataccggctgtccgtcatttttaaatataggttttcattttctcccaccagcttatataccttagcaggagacattccttccgtatcttttacgcagcggtatttttcgatcagttttttcaattccggtgatattctcattttagccatttattatttccttcctcttttctacagtatttaaagataccccaagaagctaattataacaagacgaactccaattcactgttccttgcattctaaaaccttaaataccagaaaacagctttttcaaagttgttttcaaagttggcgtataacatagtatcgacggagccgattttgaaaccgcggtgatcacaggcagcaacgctctgtcatcgttacaatcaacatgctaccctccgcgagatcatccgtgtttcaaacccggcagcttagttgccgttcttccgaatagcatcggtaacatgagcaaagtctgccgccttacaacggctctcccgctgacgccgtcccggactgatgggctgcctgtatcgagtggtgattttgtgccgagctgccggtcggggagctgttggctggctggtggcaggatatattgtggtgtaaacaaattgacgcttagacaacttaataacacattgcggacgtttttaatgtactgaattaacgccgaatta

SEQ ID NO: 38 - protein, 65 aa, Artificial sequence; identical to SEQ ID NO: 33
  Synthetic Construct

SEQ ID NO: 39 - DNA, 8674 bp, Artificial sequence
  plasmid VC-MME462-1QCZ
  transit_peptide (1673)..(1753)
  CDS (1673)..(1753)
  CDS (1754)..(1771): adapter
agctttgggcggatcctctagaggacaatcagtaaattgaacggagaatattattcataaaaatacgatagtaacgggtgatatattcattagaatgaaccgaaaccggcggtaaggatctgagctacacatgctcaggttttttacaacgtgcacaacagaattgaaagcaaatatcatgcgatcataggcgtctcgcatatctcattaaagcagggcatgccggtcgagtcaaatctcggtgacgggcaggaccggacggggcggtaccggcaggctgaagtccagctgccagaaacccacgtcatgccagttcccgtgcttgaagccggccgcccgcagcatgccgcggggggcatatccgagcgcctcgtgcatgcgcacgctcgggtcgttgggcagcccgatgacagcgaccacgctcttgaagccctgtgcctccagggacttcagcaggtgggtgtagagcgtggagcccagtcccgtccgctggtggcggggggagacgtacacggtcgactcggccgtccagtcgtaggcgttgcgtgccttccaggggcccgcgtaggcgatgccggcgacctcgccgtccacctcggcgacgagccagggatagcgctcccgcagacggacgaggtcgtccgtccactcctgcggttcctgcggctcggtacggaagttgaccgtgcttgtctcgatgtagtggttgacgatggtgcagaccgccggcatgtccgcctcggtggcacggcggatgtcggccgggcgtcgttctgggctcatggtagactcgacggatccacgtgtggaagatatgaatttttttgagaaactagataagattaatgaatatcggtgttttggttttttcttgtggccgtctttgtttatattgagatttttcaaatcagtgcgcaagacgtgacgtaagtatccgagtcagtttttatttttctactaatttggtcgaatctagactgcagcaaatttacacattgccactaaacgtctaaacccttgtaatttgtttttgttttactatgtgtgttatgtatttgatttgcgataaatttttatatttggtactaaatttataacaccttttatgctaacgtttgccaacacttagcaatttgcaagttgattaattgattctaaattatttttgtcttctaaatacatatactaatcaactggaaatgtaaatatttgctaatatttctactataggagaattaaagtgagtgaatatggtaccacaaggtttggagatttaattgttgcaatgctgcatggatggcatatacaccaaacattcaataattcttgaggataataatggtaccacacaagatttgaggtgcatgaacgtcacgtggacaaaaggtttagtaatttttcaagacaacaatgttaccacacacaagttttgaggtgcatgcatggatgccctgtggaaagtttaaaaatattttggaaatgatttgcatggaagccatgtgtaaaaccatgacatccacttggaggatgcaataatgaagaaaactacaaatttacatgcaactagttatgcatgtagtctatataatgaggattttgcaatactttcattcatacacactcactaagttttacacgattataatttcttcataccattaattaagaattcatgcagaggtttttctccgccagatcgattctcggttacgccgtcaagacgcggaggaggtctttctcttctcgttcttcggaattccagctgaccaccatggcaattcccggggatcagctcgaatttccccgatcgttcaaacatttggcaataaagtttcttaagattgaatcctgttgccggtcttgcgatgattatcatataatttctgttgaattacgttaagcatgtaataattaacatgtaatgcatgacgttatttatgagatgggtttttatgattagagtcccgcaattatacatttaatacgcgatagaaaacaaaatatagcgcgcaaactaggataaattatcgcgcgcggtgtcatctatgttactagatcgggaattggcatgcaagcttggcactggccgtcgttttacaacgtcgtgactgggaaaaccctggcgttacccaacttaatcgccttgcagcacatccccctttcgccagctggcgtaatagcgaagaggcccgcaccgatcgcccttcccaacagttgcgcagcctgaatggcgaatgctagagcagcttgagcttggatcagattgtcgtttcccgccttcagtttaaactatcagtgtttgacaggatatattggcgggtaaacctaagagaaaagagcgtttattagaataatcggatatttaaaagggcgtgaaaaggtttatccgttcgtccatttgtatgtgcatgccaaccacagggttcccctcgggatcaaagtactttgatccaacccctccgctgctatagtgcagtcggcttctgacgttcagtgcagccgtcttctgaaaacgacatgtcgcacaagtcctaagttacgcgacaggctgccgccctgcccttttcctggcgttttcttgtcgcgtgttttagtcgcataaagtagaatacttgcgactagaaccggagacattacgccatgaacaagagcgccgccgctggcctgctgggctatgcccgcgtcagcaccgacgaccaggacttgaccaaccaacgggccgaactgcacgcggccggctgcaccaagctgttttccgagaagatcaccggcaccaggcgcgaccgcccggagctggccaggatgcttgaccacctacgccctggcgacgttgtgacagtgaccaggctagaccgcctggcccgcagcacccgcgacctactggacattgccgagcgcatccaggaggccggcgcgggcctgcgtagcctggcagagccgtgggccgacaccaccacgccggccggccgcatggtgttgaccgtgttcgccggcattgccgagttcgagcgttccctaatcatcgaccgcacccggagcgggcgcgaggccgccaaggcccgaggcgtgaagtttggcccccgccctaccctcaccccggcacagatcgcgcacgcccgcgagctgatcgaccaggaaggccgcaccgtgaaagaggcggctgcactgcttggcgtgcatcgctcgaccctgtaccgcgcacttgagcgcagcgaggaagtgacgcccaccgaggccaggcggcgcggtgccttccgtgaggacgcattgaccgaggccgacgccctggcggccgccgagaatgaacgccaagaggaacaagcatgaaaccgcaccaggacggccaggacgaaccgtttttcattaccgaagagatcgaggcggagatgatcgcggccgggtacgtgttcgagccgcccgcgcacgtctcaaccgtgcggctgcatgaaatcctggccggtttgtctgatgccaagctggcggcctggccggccagcttggccgctgaagaaaccgagcgccgccgtctaaaaaggtgatgtgtatttgagtaaaacagcttgcgtcatgcggtcgctgcgtatatgatgcgatgagtaaataaacaaatacgcaaggggaacgcatgaaggttatcgctgtacttaaccagaaaggcgggtcaggcaagacgaccatcgcaacccatctagcccgcgccctgcaactcgccggggccgatgttctgttagtcgattccgatccccagggcagtgcccgcgattgggcggccgtgcgggaagatcaaccgctaaccgttgtcggcatcgaccgcccgacgattgaccgcgacgtgaaggccatcggccggcgcgacttcgtagtgatcgacggagcgccccaggcggcggacttggctgtgtccgcgatcaaggcagccgacttcgtgctgattccggtgcagccaagcccttacgacatatgggccaccgccgacctggtggagctggttaagcagcgcattgaggtcacggatggaaggctacaagcggcctttgtcgtgtcgcgggcgatcaaaggcacgcgcatcggcggtgaggttgccgaggcgctggccgggtacgagctgcccattcttgagtcccgtatcacgcagcgcgtgagctacccaggcactgccgccgccggcacaaccgttcttgaatcagaacccgagggcgacgctgcccgcgaggtccaggcgctggccgctgaaattaaatcaaaactcatttgagttaatgaggtaaagagaaaatgagcaaaagcacaaacacgctaagtgccggccgtccgagcgcacgcagcagcaaggctgcaacgttggccagcctggcagacacgccagccatgaagcgggtcaactttcagttgccggcggaggatcacaccaagctgaagatgtacgcggtacgccaaggcaagaccattaccgagctgctatctgaatacatcgcgcagctaccagagtaaatgagcaaatgaataaatgagtagatgaattttagcggctaaaggaggcggcatggaaaatcaagaacaaccaggcaccgacgccgtggaatgccccatgtgtggaggaacgggcggttggccaggcgtaagcggctgggttgcctgccggccctgcaatggcactggaacccccaagcccgaggaatcggcgtgagcggtcgcaaaccatccggcccggtacaaatcggcgcggcgctgggtgatgacctggtggagaagttgaaggccgcgcaggccgcccagcggcaacgcatcgaggcagaagcacgccccggtgaatcgtggcaagcggccgctgatcgaatccgcaaagaatcccggcaaccgccggcagccggtgcgccgtcgattaggaagccgcccaagggcgacgagcaaccagattttttcgttccgatgctctatgacgtgggcacccgcgatagtcgcagcatcatggacgtggccgttttccgtctgtcgaagcgtgaccgacgagctggcgaggtgatccgctacgagcttccagacgggcacgtagaggtttccgcagggccggccggcatggccagtgtgtgggattacgacctggtactgatggcggtttcccatctaaccgaatccatgaaccgataccgggaagggaagggagacaagcccggccgcgtgttccgtccacacgttgcggacgtactcaagttctgccggcgagccgatggcggaaagcagaaagacgacctggtagaaacctgcattcggttaaacaccacgcacgttgccatgcagcgtacgaagaaggccaagaacggccgcctggtgacggtatccgagggtgaagccttgattagccgctacaagatcgtaaagagcgaaaccgggcggccggagtacatcgagatcgagctagctgattggatgtaccgcgagatcacagaaggcaagaacccggacgtgctgacggttcaccccgattactttttgatcgatcccggcatcggccgttttctctaccgcctggcacgccgcgccgcaggcaaggcagaagccagatggttgttcaagacgatctacgaacgcagtggcagcgccggagagttcaagaagttctgtttcaccgtgcgcaagctgatcgggtcaaatgacctgccggagtacgatttgaaggaggaggcggggcaggctggcccgatcctagtcatgcgctaccgcaacctgatcgagggcgaagcatccgccggttcctaatgtacggagcagatgctagggcaaattgccctagcaggggaaaaaggtcgaaaaggtctctttcctgtggatagcacgtacattgggaacccaaagccgtacattgggaaccggaacccgtacattgggaacccaaagccgtacattgggaaccggtcacacatgtaagtgactgatataaaagagaaaaaaggcgatttttccgcctaaaactctttaaaacttattaaaactcttaaaacccgcctggcctgtgcataactgtctggccagcgcacagccgaagagctgcaaaaagcgcctacccttcggtcgctgcgctccctacgccccgccgcttcgcgtcggcctatcgcggccgctggccgctcaaaaatggctggcctacggccaggcaatctaccagggcgcggacaagccgcgccgtcgccactcgaccgccggcgcccacatcaaggcaccctgcctcgcgcgtttcggtgatgacggtgaaaacctctgacacatgcagctcccggagacggtcacagcttgtctgtaagcggatgccgggagcagacaagcccgtcagggcgcgtcagcgggtgttggcgggtgtcggggcgcagccatgacccagtcacgtagcgatagcggagtgtatactggcttaactatgcggcatcagagcagattgtactgagagtgcaccatatgcggtgtgaaataccgcacagatgcgtaaggagaaaataccgcatcaggcgctcttccgcttcctcgctcactgactcgctgcgctcggtcgttcggctgcggcgagcggtatcagctcactcaaaggcggtaatacggttatccacagaatcaggggataacgcaggaaagaacatgtgagcaaaaggccagcaaaaggccaggaaccgtaaaaaggccgcgttgctggcgtttttccataggctccgcccccctgacgagcatcacaaaaatcgacgctcaagtcagaggtggcgaaacccgacaggactataaagataccaggcgtttccccctggaagctccctcgtgcgctctcctgttccgaccctgccgcttaccggatacctgtccgcctttctcccttcgggaagcgtggcgctttctcatagctcacgctgtaggtatctcagttcggtgtaggtcgttcgctccaagctgggctgtgtgcacgaaccccccgttcagcccgaccgctgcgccttatccggtaactatcgtcttgagtccaacccggtaagacacgacttatcgccactggcagcagccactggtaacaggattagcagagcgaggtatgtaggcggtgctacagagttcttgaagtggtggcctaactacggctacactagaaggacagtatttggtatctgcgctctgctgaagccagttaccttcggaaaaagagttggtagctcttgatccggcaaacaaaccaccgctggtagcggtggtttttttgtttgcaagcagcagattacgcgcagaaaaaaaggatctcaagaagatcctttgatcttttctacggggtctgacgctcagtggaacgaaaactcacgttaagggattttggtcatgcattctaggtactaaaacaattcatccagtaaaatataatattttattttctcccaatcaggcttgatccccagtaagtcaaaaaatagctcgacatactgttcttccccgatatcctccctgatcgaccggacgcagaaggcaatgtcataccacttgtccgccctgccgcttctcccaagatcaataaagccacttactttgccatctttcacaaagatgttgctgtctcccaggtcgccgtgggaaaagacaagttcctcttcgggcttttccgtctttaaaaaatcatacagctcgcgcggatctttaaatggagtgtcttcttcccagttttcgcaatccacatcggccagatcgttattcagtaagtaatccaattcggctaagcggctgtctaagctattcgtatagggacaatccgatatgtcgatggagtgaaagagcctgatgcactccgcatacagctcgataatcttttcagggctttgttcatcttcatactcttccgagcaaaggacgccatcggcctcactcatgagcagattgctccagccatcatgccgttcaaagtgcaggacctttggaacaggcagctttccttccagccatagcatcatgtccttttcccgttccacatcataggtggtccctttataccggctgtccgtcatttttaaatataggttttcattttctcccaccagcttatataccttagcaggagacattccttccgtatcttttacgcagcggtatttttcgatcagttttttcaattccggtgatattctcattttagccatttattatttccttcctcttttctacagtatttaaagataccccaagaagctaattataacaagacgaactccaattcactgttccttgcattctaaaaccttaaataccagaaaacagctttttcaaagttgttttcaaagttggcgtataacatagtatcgacggagccgattttgaaaccgcggtgatcacaggcagcaacgctctgtcatcgttacaatcaacatgctaccctccgcgagatcatccgtgtttcaaacccggcagcttagttgccgttcttccgaatagcatcggtaacatgagcaaagtctgccgccttacaacggctctcccgctgacgccgtcccggactgatgggctgcctgtatcgagtggtgattttgtgccgagctgccggtcggggagctgttggctggctggtggcaggatatattgtggtgtaaacaaattgacgcttagacaacttaataacacattgcggacgtttttaatgtactgaattaacgccgaatta

SEQ ID NO: 40 - protein, 33 aa, Artificial sequence; identical to SEQ ID NO: 35
  Synthetic Construct

SEQ ID NO: 41 - DNA, 9045 bp, Artificial sequence
  plasmid VC-MME220-1qcz
agcttggacaatcagtaaattgaacggagaatattattcataaaaatacgatagtaacgggtgatatattcattagaatgaaccgaaaccggcggtaaggatctgagctacacatgctcaggttttttacaacgtgcacaacagaattgaaagcaaatatcatgcgatcataggcgtctcgcatatctcattaaagcagggcatgccggtcgagtcaaatctcggtgacgggcaggaccggacggggcggtaccggcaggctgaagtccagctgccagaaacccacgtcatgccagttcccgtgcttgaagccggccgcccgcagcatgccgcggggggcatatccgagcgcctcgtgcatgcgcacgctcgggtcgttgggcagcccgatgacagcgaccacgctcttgaagccctgtgcctccagggacttcagcaggtgggtgtagagcgtggagcccagtcccgtccgctggtggcggggggagacgtacacggtcgactcggccgtccagtcgtaggcgttgcgtgccttccaggggcccgcgtaggcgatgccggcgacctcgccgtccacctcggcgacgagccagggatagcgctcccgcagacggacgaggtcgtccgtccactcctgcggttcctgcggctcggtacggaagttgaccgtgcttgtctcgatgtagtggttgacgatggtgcagaccgccggcatgtccgcctcggtggcacggcggatgtcggccgggcgtcgttctgggctcatggtagactcgacggatccacgtgtggaagatatgaatttttttgagaaactagataagattaatgaatatcggtgttttggttttttcttgtggccgtctttgtttatattgagatttttcaaatcagtgcgcaagacgtgacgtaagtatccgagtcagtttttatttttctactaatttggtcgaagctttgggcggatcctctagattcgacggtatcgataagctcgcggatccctgaaagcgacgttggatgttaacatctacaaattgccttttcttatcgaccatgtacgtaagcgcttacgtttttggtggacccttgaggaaactggtagctgttgtgggcctgtggtctcaagatggatcattaatttccaccttcacctacgatggggggcatcgcaccggtgagtaatattgtacggctaagagcgaatttggcctgtaggatccctgaaagcgacgttggatgttaacatctacaaattgccttttcttatcgaccatgtacgtaagcgcttacgtttttggtggacccttgaggaaactggtagctgttgtgggcctgtggtctcaagatggatcattaatttccaccttcacctacgatggggggcatcgcaccggtgagtaatattgtacggctaagagcgaatttggcctgtaggatccctgaaagcgacgttggatgttaacatctacaaattgccttttcttatcgaccatgtacgtaagcgcttacgtttttggtggacccttgaggaaactggtagctgttgtgggcctgtggtctcaagatggatcattaatttccaccttcacctacgatggggggcatcgcaccggtgagtaatattgtacggctaagagcgaatttggcctgtaggatccgcgagctggtcaatcccattgcttttgaagcagctcaacattgatctctttctcgatcgagggagatttttcaaatcagtgcgcaagacgtgacgtaagtatccgagtcagtttttatttttctactaatttggtcgtttatttcggcgtgtaggacatggcaaccgggcctgaatttcgcgggtattctgtttctattccaactttttcttgatccgcagccattaacgacttttgaatagatacgctgacacgccaagcctcgctagtcaaaagtgtaccaaacaacgctttacagcaagaacggaatgcgcgtgacgctcgcggtgacgccatttcgccttttcagaaatggataaatagccttgcttcctattatatcttcccaaattaccaatacattacactagcatctgaatttcataaccaatctcgatacaccaaatcgaagatctcccgggttgctcttccatggcaatgattaattaacgaagagcaagagctcgaatttccccgatcgttcaaacatttggcaataaagtttcttaagattgaatcctgttgccggtcttgcgatgattatcatataatttctgttgaattacgttaagcatgtaataattaacatgtaatgcatgacgttatttatgagatgggtttttatgattagagtcccgcaattatacatttaatacgcgatagaaaacaaaatatagcgcgcaaactaggataaattatcgcgcgcggtgtcatctatgttactagatcgggaattggcatgcaagcttggcactggccgtcgttttacaacgtcgtgactgggaaaaccctggcgttacccaacttaatcgccttgcagcacatccccctttcgccagctggcgtaatagcgaagaggcccgcaccgatcgcccttcccaacagttgcgcagcctgaatggcgaatgctagagcagcttgagcttggatcagattgtcgtttcccgccttcagtttaaactatcagtgtttgacaggatatattggcgggtaaacctaagagaaaagagcgtttattagaataatcggatatttaaaagggcgtgaaaaggtttatccgttcgtccatttgtatgtgcatgccaaccacagggttcccctcgggatcaaagtactttgatccaacccctccgctgctatagtgcagtcggcttctgacgttcagtgcagccgtcttctgaaaacgacatgtcgcacaagtcctaagttacgcgacaggctgccgccctgcccttttcctggcgttttcttgtcgcgtgttttagtcgcataaagtagaatacttgcgactagaaccggagacattacgccatgaacaagagcgccgccgctggcctgctgggctatgcccgcgtcagcaccgacgaccaggacttgaccaaccaacgggccgaactgcacgcggccggctgcaccaagctgttttccgagaagatcaccggcaccaggcgcgaccgcccggagctggccaggatgcttgaccacctacgccctggcgacgttgtgacagtgaccaggctagaccgcctggcccgcagcacccgcgacctactggacattgccgagcgcatccaggaggccggcgcgggcctgcgtagcctggcagagccgtgggccgacaccaccacgccggccggccgcatggtgttgaccgtgttcgccggcattgccgagttcgagcgttccctaatcatcgaccgcacccggagcgggcgcgaggccgccaaggcccgaggcgtgaagtttggcccccgccctaccctcaccccggcacagatcgcgcacgcccgcgagctgatcgaccaggaaggccgcaccgtgaaagaggcggctgcactgcttggcgtgcatcgctcgaccctgtaccgcgcacttgagcgcagcgaggaagtgacgcccaccgaggccaggcggcgcggtgccttccgtgaggacgcattgaccgaggccgacgccctggcggccgccgagaatgaacgccaagaggaacaagcatgaaaccgcaccaggacggccaggacgaaccgtttttcattaccgaagagatcgaggcggagatgatcgcggccgggtacgtgttcgagccgcccgcgcacgtctcaaccgtgcggctgcatgaaatcctggccggtttgtctgatgccaagctggcggcctggccggccagcttggccgctgaagaaaccgagcgccgccgtctaaaaaggtgatgtgtatttgagtaaaacagcttgcgtcatgcggtcgctgcgtatatgatgcgatgagtaaataaacaaatacgcaaggggaacgcatgaaggttatcgctgtacttaaccagaaaggcgggtcaggcaagacgaccatcgcaacccatctagcccgcgccctgcaactcgccggggccgatgttctgttagtcgattccgatccccagggcagtgcccgcgattgggcggccgtgcgggaagatcaaccgctaaccgttgtcggcatcgaccgcccgacgattgaccgcgacgtgaaggccatcggccggcgcgacttcgtagtgatcgacggagcgccccaggcggcggacttggctgtgtccgcgatcaaggcagccgacttcgtgctgattccggtgcagccaagcccttacgacatatgggccaccgccgacctggtggagctggttaagcagcgcattgaggtcacggatggaaggctacaagcggcctttgtcgtgtcgcgggcgatcaaaggcacgcgcatcggcggtgaggttgccgaggcgctggccgggtacgagctgcccattcttgagtcccgtatcacgcagcgcgtgagctacccaggcactgccgccgccggcacaaccgttcttgaatcagaacccgagggcgacgctgcccgcgaggtccaggcgctggccgctgaaattaaatcaaaactcatttgagttaatgaggtaaagagaaaatgagcaaaagcacaaacacgctaagtgccggccgtccgagcgcacgcagcagcaaggctgcaacgttggccagcctggcagacacgccagccatgaagcgggtcaactttcagttgccggcggaggatcacaccaagctgaagatgtacgcggtacgccaaggcaagaccattaccgagctgctatctgaatacatcgcgcagctaccagagtaaatgagcaaatgaataaatgagtagatgaattttagcggctaaaggaggcggcatggaaaatcaagaacaaccaggcaccgacgccgtggaatgccccatgtgtggaggaacgggcggttggccaggcgtaagcggctgggttgcctgccggccctgcaatggcactggaacccccaagcccgaggaatcggcgtgagcggtcgcaaaccatccggcccggtacaaatcggcgcggcgctgggtgatgacctggtggagaagttgaaggccgcgcaggccgcccagcggcaacgcatcgaggcagaagcacgccccggtgaatcgtggcaagcggccgctgatcgaatccgcaaagaatcccggcaaccgccggcagccggtgcgccgtcgattaggaagccgcccaagggcgacgagcaaccagattttttcgttccgatgctctatgacgtgggcacccgcgatagtcgcagcatcatggacgtggccgttttccgtctgtcgaagcgtgaccgacgagctggcgaggtgatccgctacgagcttccagacgggcacgtagaggtttccgcagggccggccggcatggccagtgtgtgggattacgacctggtactgatggcggtttcccatctaaccgaatccatgaaccgataccgggaagggaagggagacaagcccggccgcgtgttccgtccacacgttgcggacgtactcaagttctgccggcgagccgatggcggaaagcagaaagacgacctggtagaaacctgcattcggttaaacaccacgcacgttgccatgcagcgtacgaagaaggccaagaacggccgcctggtgacggtatccgagggtgaagccttgattagccgctacaagatcgtaaagagcgaaaccgggcggccggagtacatcgagatcgagctagctgattggatgtaccgcgagatcacagaaggcaagaacccggacgtgctgacggttcaccccgattactttttgatcgatcccggcatcggccgttttctctaccgcctggcacgccgcgccgcaggcaaggcagaagccagatggttgttcaagacgatctacgaacgcagtggcagcgccggagagttcaagaagttctgtttcaccgtgcgcaagctgatcgggtcaaatgacctgccggagtacgatttgaaggaggaggcggggcaggctggcccgatcctagtcatgcgctaccgcaacctgatcgagggcgaagcatccgccggttcctaatgtacggagcagatgctagggcaaattgccctagcaggggaaaaaggtcgaaaaggtctctttcctgtggatagcacgtacattgggaacccaaagccgtacattgggaaccggaacccgtacattgggaacccaaagccgtacattgggaaccggtcacacatgtaagtgactgatataaaagagaaaaaaggcgatttttccgcctaaaactctttaaaacttattaaaactcttaaaacccgcctggcctgtgcataactgtctggccagcgcacagccgaagagctgcaaaaagcgcctacccttcggtcgctgcgctccctacgccccgccgcttcgcgtcggcctatcgcggccgctggccgctcaaaaatggctggcctacggccaggcaatctaccagggcgcggacaagccgcgccgtcgccactcgaccgccggcgcccacatcaaggcaccctgcctcgcgcgtttcggtgatgacggtgaaaacctctgacacatgcagctcccggagacggtcacagcttgtctgtaagcggatgccgggagcagacaagcccgtcagggcgcgtcagcgggtgttggcgggtgtcggggcgcagccatgacccagtcacgtagcgatagcggagtgtatactggcttaactatgcggcatcagagcagattgtactgagagtgcaccatatgcggtgtgaaataccgcacagatgcgtaaggagaaaataccgcatcaggcgctcttccgcttcctcgctcactgactcgctgcgctcggtcgttcggctgcggcgagcggtatcagctcactcaaaggcggtaatacggttatccacagaatcaggggataacgcaggaaagaacatgtgagcaaaaggccagcaaaaggccaggaaccgtaaaaaggccgcgttgctggcgtttttccataggctccgcccccctgacgagcatcacaaaaatcgacgctcaagtcagaggtggcgaaacccgacaggactataaagataccaggcgtttccccctggaagctccctcgtgcgctctcctgttccgaccctgccgcttaccggatacctgtccgcctttctcccttcgggaagcgtggcgctttctcatagctcacgctgtaggtatctcagttcggtgtaggtcgttcgctccaagctgggctgtgtgcacgaaccccccgttcagcccgaccgctgcgccttatccggtaactatcgtcttgagtccaacccggtaagacacgacttatcgccactggcagcagccactggtaacaggattagcagagcgaggtatgtaggcggtgctacagagttcttgaagtggtggcctaactacggctacactagaaggacagtatttggtatctgcgctctgctgaagccagttaccttcggaaaaagagttggtagctcttgatccggcaaacaaaccaccgctggtagcggtggtttttttgtttgcaagcagcagattacgcgcagaaaaaaaggatctcaagaagatcctttgatcttttctacggggtctgacgctcagtggaacgaaaactcacgttaagggattttggtcatgcattctaggtactaaaacaattcatccagtaaaatataatattttattttctcccaatcaggcttgatccccagtaagtcaaaaaatagctcgacatactgttcttccccgatatcctccctgatcgaccggacgcagaaggcaatgtcataccacttgtccgccctgccgcttctcccaagatcaataaagccacttactttgccatctttcacaaagatgttgctgtctcccaggtcgccgtgggaaaagacaagttcctcttcgggcttttccgtctttaaaaaatcatacagctcgcgcggatctttaaatggagtgtcttcttcccagttttcgcaatccacatcggccagatcgttattcagtaagtaatccaattcggctaagcggctgtctaagctattcgtatagggacaatccgatatgtcgatggagtgaaagagcctgatgcactccgcatacagctcgataatcttttcagggctttgttcatcttcatactcttccgagcaaaggacgccatcggcctcactcatgagcagattgctccagccatcatgccgttcaaagtgcaggacctttggaacaggcagctttccttccagccatagcatcatgtccttttcccgttccacatcataggtggtccctttataccggctgtccgtcatttttaaatataggttttcattttctcccaccagcttatataccttagcaggagacattccttccgtatcttttacgcagcggtatttttcgatcagttttttcaattccggtgatattctcattttagccatttattatttccttcctcttttctacagtatttaaagataccccaagaagctaattataacaagacgaactccaattcactgttccttgcattctaaaaccttaaataccagaaaacagctttttcaaagttgttttcaaagttggcgtataacatagtatcgacggagccgattttgaaaccgcggtgatcacaggcagcaacgctctgtcatcgttacaatcaacatgctaccctccgcgagatcatccgtgtttcaaacccggcagcttagttgccgttcttccgaatagcatcggtaacatgagcaaagtctgccgccttacaacggctctcccgctgacgccgtcccggactgatgggctgcctgtatcgagtggtgattttgtgccgagctgccggtcggggagctgttggctggctggtggcaggatatattgtggtgtaaacaaattgacgcttagacaacttaataacacattgcggacgtttttaatgtactgaattaacgccgaatta

SEQ ID NO: 42 - DNA, 9466 bp, Artificial sequence
  plasmid VC-MME432-1qcz
  5'UTR (2125)..(2289)
  transit_peptide (2290)..(2397)
  CDS (2290)..(2397)
  transit_peptide (2475)..(2543)
  CDS (2475)..(2543)
  CDS (2544)..(2552): adapter
gctttgggcggatcctctagaggacaatcagtaaattgaacggagaatattattcataaaaatacgatagtaacgggtgatatattcattagaatgaaccgaaaccggcggtaaggatctgagctacacatgctcaggttttttacaacgtgcacaacagaattgaaagcaaatatcatgcgatcataggcgtctcgcatatctcattaaagcagggcatgccggtcgagtcaaatctcggtgacgggcaggaccggacggggcggtaccggcaggctgaagtccagctgccagaaacccacgtcatgccagttcccgtgcttgaagccggccgcccgcagcatgccgcggggggcatatccgagcgcctcgtgcatgcgcacgctcgggtcgttgggcagcccgatgacagcgaccacgctcttgaagccctgtgcctccagggacttcagcaggtgggtgtagagcgtggagcccagtcccgtccgctggtggcggggggagacgtacacggtcgactcggccgtccagtcgtaggcgttgcgtgccttccaggggcccgcgtaggcgatgccggcgacctcgccgtccacctcggcgacgagccagggatagcgctcccgcagacggacgaggtcgtccgtccactcctgcggttcctgcggctcggtacggaagttgaccgtgcttgtctcgatgtagtggttgacgatggtgcagaccgccggcatgtccgcctcggtggcacggcggatgtcggccgggcgtcgttctgggctcatggtagactcgacggatccacgtgtggaagatatgaatttttttgagaaactagataagattaatgaatatcggtgttttggttttttcttgtggccgtctttgtttatattgagatttttcaaatcagtgcgcaagacgtgacgtaagtatccgagtcagtttttatttttctactaatttggtcgaatctagattcgacggtatcgataagctcgcggatccctgaaagcgacgttggatgttaacatctacaaattgccttttcttatcgaccatgtacgtaagcgcttacgtttttggtggacccttgaggaaactggtagctgttgtgggcctgtggtctcaagatggatcattaatttccaccttcacctacgatggggggcatcgcaccggtgagtaatattgtacggctaagagcgaatttggcctgtaggatccctgaaagcgacgttggatgttaacatctacaaattgccttttcttatcgaccatgtacgtaagcgcttacgtttttggtggacccttgaggaaactggtagctgttgtgggcctgtggtctcaagatggatcattaatttccaccttcacctacgatggggggcatcgcaccggtgagtaatattgtacggctaagagcgaatttggcctgtaggatccctgaaagcgacgttggatgttaacatctacaaattgccttttcttatcgaccatgtacgtaagcgcttacgtttttggtggacccttgaggaaactggtagctgttgtgggcctgtggtctcaagatggatcattaatttccaccttcacctacgatggggggcatcgcaccggtgagtaatattgtacggctaagagcgaatttggcctgtaggatccgcgagctggtcaatcccattgcttttgaagcagctcaacattgatctctttctcgatcgagggagatttttcaaatcagtgcgcaagacgtgacgtaagtatccgagtcagtttttatttttctactaatttggtcgtttatttcggcgtgtaggacatggcaaccgggcctgaatttcgcgggtattctgtttctattccaactttttcttgatccgcagccattaacgacttttgaatagatacgctgacacgccaagcctcgctagtcaaaagtgtaccaaacaacgctttacagcaagaacggaatgcgcgtgacgctcgcggtgacgccatttcgccttttcagaaatggataaatagccttgcttcctattatatcttcccaaattaccaatacattacactagcatctgaatttcataaccaatctcgatacaccaaatcgaagatctcccaaacgcataaacttatcttcatagttgccactccaatttgctccttgaatctcctccacccaatacataatccactcctccatcacccacttcactactaaatcaaacttaactctgtttttctctctcctcctttcatttcttattcttccaatcatcgtactccgccatgaccaccgctgtcaccgccgctgtttctttcccctctaccaaaaccacctctctctccgcccgaagctcctccgtcatttcccctgacaaaatcagctacaaaaaggtgattcccaatttcactgtgttttttattaataatttgttattttgatgatgagatgattaatttgggtgctgcaggttcctttgtactacaggaatgtatctgcaactgggaaaatgggacccatcagggcccagatcgcctcttgctcttccatggcaatgattaattaacgaagagcaagagctcgaatttccccgatcgttcaaacatttggcaataaagtttcttaagattgaatcctgttgccggtcttgcgatgattatcatataatttctgttgaattacgttaagcatgtaataattaacatgtaatgcatgacgttatttatgagatgggtttttatgattagagtcccgcaattatacatttaatacgcgatagaaaacaaaatatagcgcgcaaactaggataaattatcgcgcgcggtgtcatctatgttactagatcgggaattggcatgcaagcttggcactggccgtcgttttacaacgtcgtgactgggaaaaccctggcgttacccaacttaatcgccttgcagcacatccccctttcgccagctggcgtaatagcgaagaggcccgcaccgatcgcccttcccaacagttgcgcagcctgaatggcgaatgctagagcagcttgagcttggatcagattgtcgtttcccgccttcagtttaaactatcagtgtttgacaggatatattggcgggtaaacctaagagaaaagagcgtttattagaataatcggatatttaaaagggcgtgaaaaggtttatccgttcgtccatttgtatgtgcatgccaaccacagggttcccctcgggatcaaagtactttgatccaacccctccgctgctatagtgcagtcggcttctgacgttcagtgcagccgtcttctgaaaacgacatgtcgcacaagtcctaagttacgcgacaggctgccgccctgcccttttcctggcgttttcttgtcgcgtgttttagtcgcataaagtagaatacttgcgactagaaccggagacattacgccatgaacaagagcgccgccgctggcctgctgggctatgcccgcgtcagcaccgacgaccaggacttgaccaaccaacgggccgaactgcacgcggccggctgcaccaagctgttttccgagaagatcaccggcaccaggcgcgaccgcccggagctggccaggatgcttgaccacctacgccctggcgacgttgtgacagtgaccaggctagaccgcctggcccgcagcacccgcgacctactggacattgccgagcgcatccaggaggccggcgcgggcctgcgtagcctggcagagccgtgggccgacaccaccacgccggccggccgcatggtgttgaccgtgttcgccggcattgccgagttcgagcgttccctaatcatcgaccgcacccggagcgggcgcgaggccgccaaggcccgaggcgtgaagtttggcccccgccctaccctcaccccggcacagatcgcgcacgcccgcgagctgatcgaccaggaaggccgcaccgtgaaagaggcggctgcactgcttggcgtgcatcgctcgaccctgtaccgcgcacttgagcgcagcgaggaagtgacgcccaccgaggccaggcggcgcggtgccttccgtgaggacgcattgaccgaggccgacgccctggcggccgccgagaatgaacgccaagaggaacaagcatgaaaccgcaccaggacggccaggacgaaccgtttttcattaccgaagagatcgaggcggagatgatcgcggccgggtacgtgttcgagccgcccgcgcacgtctcaaccgtgcggctgcatgaaatcctggccggtttgtctgatgccaagctggcggcctggccggccagcttggccgctgaagaaaccgagcgccgccgtctaaaaaggtgatgtgtatttgagtaaaacagcttgcgtcatgcggtcgctgcgtatatgatgcgatgagtaaataaacaaatacgcaaggggaacgcatgaaggttatcgctgtacttaaccagaaaggcgggtcaggcaagacgaccatcgcaacccatctagcccgcgccctgcaactcgccggggccgatgttctgttagtcgattccgatccccagggcagtgcccgcgattgggcggccgtgcgggaagatcaaccgctaaccgttgtcggcatcgaccgcccgacgattgaccgcgacgtgaaggccatcggccggcgcgacttcgtagtgatcgacggagcgccccaggcggcggacttggctgtgtccgcgatcaaggcagccgacttcgtgctgattccggtgcagccaagcccttacgacatatgggccaccgccgacctggtggagctggttaagcagcgcattgaggtcacggatggaaggctacaagcggcctttgtcgtgtcgcgggcgatcaaaggcacgcgcatcggcggtgaggttgccgaggcgctggccgggtacgagctgcccattcttgagtcccgtatcacgcagcgcgtgagctacccaggcactgccgccgccggcacaaccgttcttgaatcagaacccgagggcgacgctgcccgcgaggtccaggcgctggccgctgaaattaaatcaaaactcatttgagttaatgaggtaaagagaaaatgagcaaaagcacaaacacgctaagtgccggccgtccgagcgcacgcagcagcaaggctgcaacgttggccagcctggcagacacgccagccatgaagcgggtcaactttcagttgccggcggaggatcacaccaagctgaagatgtacgcggtacgccaaggcaagaccattaccgagctgctatctgaatacatcgcgcagctaccagagtaaatgagcaaatgaataaatgagtagatgaattttagcggctaaaggaggcggcatggaaaatcaagaacaaccaggcaccgacgccgtggaatgccccatgtgtggaggaacgggcggttggccaggcgtaagcggctgggttgcctgccggccctgcaatggcactggaacccccaagcccgaggaatcggcgtgagcggtcgcaaaccatccggcccggtacaaatcggcgcggcgctgggtgatgacctggtggagaagttgaaggccgcgcaggccgcccagcggcaacgcatcgaggcagaagcacgccccggtgaatcgtggcaagcggccgctgatcgaatccgcaaagaatcccggcaaccgccggcagccggtgcgccgtcgattaggaagccgcccaagggcgacgagcaaccagattttttcgttccgatgctctatgacgtgggcacccgcgatagtcgcagcatcatggacgtggccgttttccgtctgtcgaagcgtgaccgacgagctggcgaggtgatccgctacgagcttccagacgggcacgtagaggtttccgcagggccggccggcatggccagtgtgtgggattacgacctggtactgatggcggtttcccatctaaccgaatccatgaaccgataccgggaagggaagggagacaagcccggccgcgtgttccgtccacacgttgcggacgtactcaagttctgccggcgagccgatggcggaaagcagaaagacgacctggtagaaacctgcattcggttaaacaccacgcacgttgccatgcagcgtacgaagaaggccaagaacggccgcctggtgacggtatccgagggtgaagccttgattagccgctacaagatcgtaaagagcgaaaccgggcggccggagtacatcgagatcgagctagctgattggatgtaccgcgagatcacagaaggcaagaacccggacgtgctgacggttcaccccgattactttttgatcgatcccggcatcggccgttttctctaccgcctggcacgccgcgccgcaggcaaggcagaagccagatggttgttcaagacgatctacgaacgcagtggcagcgccggagagttcaagaagttctgtttcaccgtgcgcaagctgatcgggtcaaatgacctgccggagtacgatttgaaggaggaggcggggcaggctggcccgatcctagtcatgcgctaccgcaacctgatcgagggcgaagcatccgccggttcctaatgtacggagcagatgctagggcaaattgccctagcaggggaaaaaggtcgaaaaggtctctttcctgtggatagcacgtacattgggaacccaaagccgtacattgggaaccggaacccgtacattgggaacccaaagccgtacattgggaaccggtcacacatgtaagtgactgatataaaagagaaaaaaggcgatttttccgcctaaaactctttaaaacttattaaaactcttaaaacccgcctggcctgtgcataactgtctggccagcgcacagccgaagagctgcaaaaagcgcctacccttcggtcgctgcgctccctacgccccgccgcttcgcgtcggcctatcgcggccgctggccgctcaaaaatggctggcctacggccaggcaatctaccagggcgcggacaagccgcgccgtcgccactcgaccgccggcgcccacatcaaggcaccctgcctcgcgcgtttcggtgatgacggtgaaaacctctgacacatgcagctcccggagacggtcacagcttgtctgtaagcggatgccgggagcagacaagcccgtcagggcgcgtcagcgggtgttggcgggtgtcggggcgcagccatgacccagtcacgtagcgatagcggagtgtatactggcttaactatgcggcatcagagcagattgtactgagagtgcaccatatgcggtgtgaaataccgcacagatgcgtaaggagaaaataccgcatcaggcgctcttccgcttcctcgctcactgactcgctgcgctcggtcgttcggctgcggcgagcggtatcagctcactcaaaggcggtaatacggttatccacagaatcaggggataacgcaggaaagaacatgtgagcaaaaggccagcaaaaggccaggaaccgtaaaaaggccgcgttgctggcgtttttccataggctccgcccccctgacgagcatcacaaaaatcgacgctcaagtcagaggtggcgaaacccgacaggactataaagataccaggcgtttccccctggaagctccctcgtgcgctctcctgttccgaccctgccgcttaccggatacctgtccgcctttctcccttcgggaagcgtggcgctttctcatagctcacgctgtaggtatctcagttcggtgtaggtcgttcgctccaagctgggctgtgtgcacgaaccccccgttcagcccgaccgctgcgccttatccggtaactatcgtcttgagtccaacccggtaagacacgacttatcgccactggcagcagccactggtaacaggattagcagagcgaggtatgtaggcggtgctacagagttcttgaagtggtggcctaactacggctacactagaaggacagtatttggtatctgcgctctgctgaagccagttaccttcggaaaaagagttggtagctcttgatccggcaaacaaaccaccgctggtagcggtggtttttttgtttgcaagcagcagattacgcgcagaaaaaaaggatctcaagaagatcctttgatcttttctacggggtctgacgctcagtggaacgaaaactcacgttaagggattttggtcatgcattctaggtactaaaacaattcatccagtaaaatataatattttattttctcccaatcaggcttgatccccagtaagtcaaaaaatagctcgacatactgttcttccccgatatcctccctgatcgaccggacgcagaaggcaatgtcataccacttgtccgccctgccgcttctcccaagatcaataaagccacttactttgccatctttcacaaagatgttgctgtctcccaggtcgccgtgggaaaagacaagttcctcttcgggcttttccgtctttaaaaaatcatacagctcgcgcggatctttaaatggagtgtcttcttcccagttttcgcaatccacatcggccagatcgttattcagtaagtaatccaattcggctaagcggctgtctaagctattcgtatagggacaatccgatatgtcgatggagtgaaagagcctgatgcactccgcatacagctcgataatcttttcagggctttgttcatcttcatactcttccgagcaaaggacgccatcggcctcactcatgagcagattgctccagccatcatgccgttcaaagtgcaggacctttggaacaggcagctttccttccagccatagcatcatgtccttttcccgttccacatcataggtggtccctttataccggctgtccgtcatttttaaatataggttttcattttctcccaccagcttatataccttagcaggagacattccttccgtatcttttacgcagcggtatttttcgatcagttttttcaattccggtgatattctcattttagccatttattatttccttcctcttttctacagtatttaaagataccccaagaagctaattataacaagacgaactccaattcactgttccttgcattctaaaaccttaaataccagaaaacagctttttcaaagttgttttcaaagttggcgtataacatagtatcgacggagccgattttgaaaccgcggtgatcacaggcagcaacgctctgtcatcgttacaatcaacatgctaccctccgcgagatcatccgtgtttcaaacccggcagcttagttgccgttcttccgaatagcatcggtaacatgagcaaagtctgccgccttacaacggctctcccgctgacgccgtcccggactgatgggctgcctgtatcgagtggtgattttgtgccgagctgccggtcggggagctgttggctggctggtggcaggatatattgtggtgtaaacaaattgacgcttagacaacttaataacacattgcggacgtttttaatgtactgaattaacgccgaattaa

SEQ ID NO: 43 - protein, 62 aa, Artificial sequence
  Synthetic Construct
MTTAVTAAVSFPSTKTTSLSARSSSVISPDKISYKKVPLYYRNVSATGKMGPIRAQIASCSS

SEQ ID NO: 44 - DNA, 9137 bp, Artificial sequence
  plasmid VC-MME431-1qcz
  transit_peptide (2125)..(2214)
  CDS (2125)..(2214)
  CDS (2215)..(2223): adapter
gctttgggcggatcctctagaggacaatcagtaaattgaacggagaatattattcataaaaatacgatagtaacgggtgatatattcattagaatgaaccgaaaccggcggtaaggatctgagctacacatgctcaggttttttacaacgtgcacaacagaattgaaagcaaatatcatgcgatcataggcgtctcgcatatctcattaaagcagggcatgccggtcgagtcaaatctcggtgacgggcaggaccggacggggcggtaccggcaggctgaagtccagctgccagaaacccacgtcatgccagttcccgtgcttgaagccggccgcccgcagcatgccgcggggggcatatccgagcgcctcgtgcatgcgcacgctcgggtcgttgggcagcccgatgacagcgaccacgctcttgaagccctgtgcctccagggacttcagcaggtgggtgtagagcgtggagcccagtcccgtccgctggtggcggggggagacgtacacggtcgactcggccgtccagtcgtaggcgttgcgtgccttccaggggcccgcgtaggcgatgccggcgacctcgccgtccacctcggcgacgagccagggatagcgctcccgcagacggacgaggtcgtccgtccactcctgcggttcctgcggctcggtacggaagttgaccgtgcttgtctcgatgtagtggttgacgatggtgcagaccgccggcatgtccgcctcggtggcacggcggatgtcggccgggcgtcgttctgggctcatggtagactcgacggatccacgtgtggaagatatgaatttttttgagaaactagataagattaatgaatatcggtgttttggttttttcttgtggccgtctttgtttatattgagatttttcaaatcagtgcgcaagacgtgacgtaagtatccgagtcagtttttatttttctactaatttggtcgaatctagattcgacggtatcgataagctcgcggatccctgaaagcgacgttggatgttaacatctacaaattgccttttcttatcgaccatgtacgtaagcgcttacgtttttggtggacccttgaggaaactggtagctgttgtgggcctgtggtctcaagatggatcattaatttccaccttcacctacgatggggggcatcgcaccggtgagtaatattgtacggctaagagcgaatttggcctgtaggatccctgaaagcgacgttggatgttaacatctacaaattgccttttcttatcgaccatgtacgtaagcgcttacgtttttggtggacccttgaggaaactggtagctgttgtgggcctgtggtctcaagatggatcattaatttccaccttcacctacgatggggggcatcgcaccggtgagtaatattgtacggctaagagcgaatttggcctgtaggatccctgaaagcgacgttggatgttaacatctacaaattgccttttcttatcgaccatgtacgtaagcgcttacgtttttggtggacccttgaggaaactggtagctgttgtgggcctgtggtctcaagatggatcattaatttccaccttcacctacgatggggggcatcgcaccggtgagtaatattgtacggctaagagcgaatttggcctgtaggatccgcgagctggtcaatcccattgcttttgaagcagctcaacattgatctctttctcgatcgagggagatttttcaaatcagtgcgcaagacgtgacgtaagtatccgagtcagtttttatttttctactaatttggtcgtttatttcggcgtgtaggacatggcaaccgggcctgaatttcgcgggtattctgtttctattccaactttttcttgatccgcagccattaacgacttttgaatagatacgctgacacgccaagcctcgctagtcaaaagtgtaccaaacaacgctttacagcaagaacggaatgcgcgtgacgctcgcggtgacgccatttcgccttttcagaaatggataaatagccttgcttcctattatatcttcccaaattaccaatacattacactagcatctgaatttcataaccaatctcgatacaccaaatcgaagatctcccaaacatgcagaggtttttctccgccagatcgattctcggttacgccgtcaagacgcggaggaggtctttctcttctcgttcttcgtctctcctttgctcttccatggcaatgattaattaacgaagagcaagagctcgaatttccccgatcgttcaaacatttggcaataaagtttcttaagattgaatcctgttgccggtcttgcgatgattatcatataatttctgttgaattacgttaagcatgtaataattaacatgtaatgcatgacgttatttatgagatgggtttttatgattagagtcccgcaattatacatttaatacgcgatagaaaacaaaatatagcgcgcaaactaggataaattatcgcgcgcggtgtcatctatgttactagatcgggaattggcatgcaagcttggcactggccgtcgttttacaacgtcgtgactgggaaaaccctggcgttacccaacttaatcgccttgcagcacatccccctttcgccagctggcgtaatagcgaagaggcccgcaccgatcgcccttcccaacagttgcgcagcctgaatggcgaatgctagagcagcttgagcttggatcagattgtcgtttcccgccttcagtttaaactatcagtgtttgacaggatatattggcgggtaaacctaagagaaaagagcgtttattagaataatcggatatttaaaagggcgtgaaaaggtttatccgttcgtccatttgtatgtgcatgccaaccacagggttcccctcgggatcaaagtactttgatccaacccctccgctgctatagtgcagtcggcttctgacgttcagtgcagccgtcttctgaaaacgacatgtcgcacaagtcctaagttacgcgacaggctgccgccctgcccttttcctggcgttttcttgtcgcgtgttttagtcgcataaagtagaatacttgcgactagaaccggagacattacgccatgaacaagagcgccgccgctggcctgctgggctatgcccgcgtcagcaccgacgaccaggacttgaccaaccaacgggccgaactgcacgcggccggctgcaccaagctgttttccgagaagatcaccggcaccaggcgcgaccgcccggagctggccaggatgcttgaccacctacgccctggcgacgttgtgacagtgaccaggctagaccgcctggcccgcagcacccgcgacctactggacattgccgagcgcatccaggaggccggcgcgggcctgcgtagcctggcagagccgtgggccgacaccaccacgccggccggccgcatggtgttgaccgtgttcgccggcattgccgagttcgagcgttccctaatcatcgaccgcacccggagcgggcgcgaggccgccaaggcccgaggcgtgaagtttggcccccgccctaccctcaccccggcacagatcgcgcacgcccgcgagctgatcgaccaggaaggccgcaccgtgaaagaggcggctgcactgcttggcgtgcatcgctcgaccctgtaccgcgcacttgagcgcagcgaggaagtgacgcccaccgaggccaggcggcgcggtgccttccgtgaggacgcattgaccgaggccgacgccctggcggccgccgagaatgaacgccaagaggaacaagcatgaaaccgcaccaggacggccaggacgaaccgtttttcattaccgaagagatcgaggcggagatgatcgcggccgggtacgtgttcgagccgcccgcgcacgtctcaaccgtgcggctgcatgaaatcctggccggtttgtctgatgccaagctggcggcctggccggccagcttggccgctgaagaaaccgagcgccgccgtctaaaaaggtgatgtgtatttgagtaaaacagcttgcgtcatgcggtcgctgcgtatatgatgcgatgagtaaataaacaaatacgcaaggggaacgcatgaaggttatcgctgtacttaaccagaaaggcgggtcaggcaagacgaccatcgcaacccatctagcccgcgccctgcaactcgccggggccgatgttctgttagtcgattccgatccccagggcagtgcccgcgattgggcggccgtgcgggaagatcaaccgctaaccgttgtcggcatcgaccgcccgacgattgaccgcgacgtgaaggccatcggccggcgcgacttcgtagtgatcgacggagcgccccaggcggcggacttggctgtgtccgcgatcaaggcagccgacttcgtgctgattccggtgcagccaagcccttacgacatatgggccaccgccgacctggtggagctggttaagcagcgcattgaggtcacggatggaaggctacaagcggcctttgtcgtgtcgcgggcgatcaaaggcacgcgcatcggcggtgaggttgccgaggcgctggccgggtacgagctgcccattcttgagtcccgtatcacgcagcgcgtgagctacccaggcactgccgccgccggcacaaccgttcttgaatcagaacccgagggcgacgctgcccgcgaggtccaggcgctggccgctgaaattaaatcaaaactcatttgagttaatgaggtaaagagaaaatgagcaaaagcacaaacacgctaagtgccggccgtccgagcgcacgcagcagcaaggctgcaacgttggccagcctggcagacacgccagccatgaagcgggtcaactttcagttgccggcggaggatcacaccaagctgaagatgtacgcggtacgccaaggcaagaccattaccgagctgctatctgaatacatcgcgcagctaccagagtaaatgagcaaatgaataaatgagtagatgaattttagcggctaaaggaggcggcatggaaaatcaagaacaaccaggcaccgacgccgtggaatgccccatgtgtggaggaacgggcggttggccaggcgtaagcggctgggttgcctgccggccctgcaatggcactggaacccccaagcccgaggaatcggcgtgagcggtcgcaaaccatccggcccggtacaaatcggcgcggcgctgggtgatgacctggtggagaagttgaaggccgcgcaggccgcccagcggcaacgcatcgaggcagaagcacgccccggtgaatcgtggcaagcggccgctgatcgaatccgcaaagaatcccggcaaccgccggcagccggtgcgccgtcgattaggaagccgcccaagggcgacgagcaaccagattttttcgttccgatgctctatgacgtgggcacccgcgatagtcgcagcatcatggacgtggccgttttccgtctgtcgaagcgtgaccgacgagctggcgaggtgatccgctacgagcttccagacgggcacgtagaggtttccgcagggccggccggcatggccagtgtgtgggattacgacctggtactgatggcggtttcccatctaaccgaatccatgaaccgataccgggaagggaagggagacaagcccggccgcgtgttccgtccacacgttgcggacgtactcaagttctgccggcgagccgatggcggaaagcagaaagacgacctggtagaaacctgcattcggttaaacaccacgcacgttgccatgcagcgtacgaagaaggccaagaacggccgcctggtgacggtatccgagggtgaagccttgattagccgctacaagatcgtaaagagcgaaaccgggcggccggagtacatcgagatcgagctagctgattggatgtaccgcgagatcacagaaggcaagaacccggacgtgctgacggttcaccccgattactttttgatcgatcccggcatcggccgttttctctaccgcctggcacgccgcgccgcaggcaaggcagaagccagatggttgttcaagacgatctacgaacgcagtggcagcgccggagagttcaagaagttctgtttcaccgtgcgcaagctgatcgggtcaaatgacctgccggagtacgatttgaaggaggaggcggggcaggctggcccgatcctagtcatgcgctaccgcaacctgatcgagggcgaagcatccgccggttcctaatgtacggagcagatgctagggcaaattgccctagcaggggaaaaaggtcgaaaaggtctctttcctgtggatagcacgtacattgggaacccaaagccgtacattgggaaccggaacccgtacattgggaacccaaagccgtacattgggaaccggtcacacatgtaagtgactgatataaaagagaaaaaaggcgatttttccgcctaaaactctttaaaacttattaaaactcttaaaacccgcctggcctgtgcataactgtctggccagcgcacagccgaagagctgcaaaaagcgcctacccttcggtcgctgcgctccctacgccccgccgcttcgcgtcggcctatcgcggccgctggccgctcaaaaatggctggcctacggccaggcaatctaccagggcgcggacaagccgcgccgtcgccactcgaccgccggcgcccacatcaaggcaccctgcctcgcgcgtttcggtgatgacggtgaaaacctctgacacatgcagctcccggagacggtcacagcttgtctgtaagcggatgccgggagcagacaagcccgtcagggcgcgtcagcgggtgttggcgggtgtcggggcgcagccatgacccagtcacgtagcgatagcggagtgtatactggcttaactatgcggcatcagagcagattgtactgagagtgcaccatatgcggtgtgaaataccgcacagatgcgtaaggagaaaataccgcatcaggcgctcttccgcttcctcgctcactgactcgctgcgctcggtcgttcggctgcggcgagcggtatcagctcactcaaaggcggtaatacggttatccacagaatcaggggataacgcaggaaagaacatgtgagcaaaaggccagcaaaaggccaggaaccgtaaaaaggccgcgttgctggcgtttttccataggctccgcccccctgacgagcatcacaaaaatcgacgctcaagtcagaggtggcgaaacccgacaggactataaagataccaggcgtttccccctggaagctccctcgtgcgctctcctgttccgaccctgccgcttaccggatacctgtccgcctttctcccttcgggaagcgtggcgctttctcatagctcacgctgtaggtatctcagttcggtgtaggtcgttcgctccaagctgggctgtgtgcacgaaccccccgttcagcccgaccgctgcgccttatccggtaactatcgtcttgagtccaacccggtaagacacgacttatcgccactggcagcagccactggtaacaggattagcagagcgaggtatgtaggcggtgctacagagttcttgaagtggtggcctaactacggctacactagaaggacagtatttggtatctgcgctctgctgaagccagttaccttcggaaaaagagttggtagctcttgatccggcaaacaaaccaccgctggtagcggtggtttttttgtttgcaagcagcagattacgcgcagaaaaaaaggatctcaagaagatcctttgatcttttctacggggtctgacgctcagtggaacgaaaactcacgttaagggattttggtcatgcattctaggtactaaaacaattcatccagtaaaatataatattttattttctcccaatcaggcttgatccccagtaagtcaaaaaatagctcgacatactgttcttccccgatatcctccctgatcgaccggacgcagaaggcaatgtcataccacttgtccgccctgccgcttctcccaagatcaataaagccacttactttgccatctttcacaaagatgttgctgtctcccaggtcgccgtgggaaaagacaagttcctcttcgggcttttccgtctttaaaaaatcatacagctcgcgcggatctttaaatggagtgtcttcttcccagttttcgcaatccacatcggccagatcgttattcagtaagtaatccaattcggctaagcggctgtctaagctattcgtatagggacaatccgatatgtcgatggagtgaaagagcctgatgcactccgcatacagctcgataatcttttcagggctttgttcatcttcatactcttccgagcaaaggacgccatcggcctcactcatgagcagattgctccagccatcatgccgttcaaagtgcaggacctttggaacaggcagctttccttccagccatagcatcatgtccttttcccgttccacatcataggtggtccctttataccggctgtccgtcatttttaaatataggttttcattttctcccaccagcttatataccttagcaggagacattccttccgtatcttttacgcagcggtatttttcgatcagttttttcaattccggtgatattctcattttagccatttattatttccttcctcttttctacagtatttaaagataccccaagaagctaattataacaagacgaactccaattcactgttccttgcattctaaaaccttaaataccagaaaacagctttttcaaagttgttttcaaagttggcgtataacatagtatcgacggagccgattttgaaaccgcggtgatcacaggcagcaacgctctgtcatcgttacaatcaacatgctaccctccgcgagatcatccgtgtttcaaacccggcagcttagttgccgttcttccgaatagcatcggtaacatgagcaaagtctgccgccttacaacggctctcccgctgacgccgtcccggactgatgggctgcctgtatcgagtggtgattttgtgccgagctgccggtcggggagctgttggctggctggtggcaggatatattgtggtgtaaacaaattgacgcttagacaacttaataacacattgcggacgtttttaatgtactgaattaacgccgaattaa

SEQ ID NO: 45 - protein, 33 aa, Artificial sequence
  Synthetic Construct
MQRFFSARSILGYAVKTRRRSFSSRSSSLLCSS

SEQ ID NO: 46 - DNA, 8885 bp, Artificial sequence
  plasmid VC-MME221-1qcz
agcttggacaatcagtaaattgaacggagaatattattcataaaaatacgatagtaacgggtgatatattcattagaatgaaccgaaaccggcggtaaggatctgagctacacatgctcaggttttttacaacgtgcacaacagaattgaaagcaaatatcatgcgatcataggcgtctcgcatatctcattaaagcagggcatgccggtcgagtcaaatctcggtgacgggcaggaccggacggggcggtaccggcaggctgaagtccagctgccagaaacccacgtcatgccagttcccgtgcttgaagccggccgcccgcagcatgccgcggggggcatatccgagcgcctcgtgcatgcgcacgctcgggtcgttgggcagcccgatgacagcgaccacgctcttgaagccctgtgcctccagggacttcagcaggtgggtgtagagcgtggagcccagtcccgtccgctggtggcggggggagacgtacacggtcgactcggccgtccagtcgtaggcgttgcgtgccttccaggggcccgcgtaggcgatgccggcgacctcgccgtccacctcggcgacgagccagggatagcgctcccgcagacggacgaggtcgtccgtccactcctgcggttcctgcggctcggtacggaagttgaccgtgcttgtctcgatgtagtggttgacgatggtgcagaccgccggcatgtccgcctcggtggcacggcggatgtcggccgggcgtcgttctgggctcatggtagactcgacggatccacgtgtggaagatatgaatttttttgagaaactagataagattaatgaatatcggtgttttggttttttcttgtggccgtctttgtttatattgagatttttcaaatcagtgcgcaagacgtgacgtaagtatccgagtcagtttttatttttctactaatttggtcgaagctttgggcggatcctctagaattcgaatccaaaaattacggatatgaatataggcatatccgtatccgaattatccgtttgacagctagcaacgattgtacaattgcttctttaaaaaaggaagaaagaaagaaagaaaagaatcaacatcagcgttaacaaacggccccgttacggcccaaacggtcatatagagtaacggcgttaagcgttgaaagactcctatcgaaatacgtaaccgcaaacgtgtcatagtcagatcccctcttccttcaccgcctcaaacacaaaaataatcttctacagcctatatatacaacccccccttctatctctcctttctcacaattcatcatctttctttctctacccccaattttaagaaatcctctcttctcctcttcattttcaaggtaaatctctctctctctctctctctctgttattccttgttttaattaggtatgtattattgctagtttgttaatctgcttatcttatgtatgccttatgtgaatatctttatcttgttcatctcatccgtttagaagctataaatttgttgatttgactgtgtatctacacgtggttatgtttatatctaatcagatatgaatttcttcatattgttgcgtttgtgtgtaccaatccgaaatcgttgatttttttcatttaatcgtgtagctaattgtacgtatacatatggatctacgtatcaattgttcatctgtttgtgtttgtatgtatacagatctgaaaacatcacttctctcatctgattgtgttgttacatacatagatatagatctgttatatcattttttttattaattgtgtatatatatatgtgcatagatctggattacatgattgtgattatttacatgattttgttatttacgtatgtatatatgtagatctggactttttggagttgttgacttgattgtatttgtgtgtgtatatgtgtgttctgatcttgatatgttatgtatgtgcagcccgggttgctcttccatggcaatgattaattaacgaagagcaagagctcgaatttccccgatcgttcaaacatttggcaataaagtttcttaagattgaatcctgttgccggtcttgcgatgattatcatataatttctgttgaattacgttaagcatgtaataattaacatgtaatgcatgacgttatttatgagatgggtttttatgattagagtcccgcaattatacatttaatacgcgatagaaaacaaaatatagcgcgcaaactaggataaattatcgcgcgcggtgtcatctatgttactagatcgggaattggcatgcaagcttggcactggccgtcgttttacaacgtcgtgactgggaaaaccctggcgttacccaacttaatcgccttgcagcacatccccctttcgccagctggcgtaatagcgaagaggcccgcaccgatcgcccttcccaacagttgcgcagcctgaatggcgaatgctagagcagcttgagcttggatcagattgtcgtttcccgccttcagtttaaactatcagtgtttgacaggatatattggcgggtaaacctaagagaaaagagcgtttattagaataatcggatatttaaaagggcgtgaaaaggtttatccgttcgtccatttgtatgtgcatgccaaccacagggttcccctcgggatcaaagtactttgatccaacccctccgctgctatagtgcagtcggcttctgacgttcagtgcagccgtcttctgaaaacgacatgtcgcacaagtcctaagttacgcgacaggctgccgccctgcccttttcctggcgttttcttgtcgcgtgttttagtcgcataaagtagaatacttgcgactagaaccggagacattacgccatgaacaagagcgccgccgctggcctgctgggctatgcccgcgtcagcaccgacgaccaggacttgaccaaccaacgggccgaactgcacgcggccggctgcaccaagctgttttccgagaagatcaccggcaccaggcgcgaccgcccggagctggccaggatgcttgaccacctacgccctggcgacgttgtgacagtgaccaggctagaccgcctggcccgcagcacccgcgacctactggacattgccgagcgcatccaggaggccggcgcgggcctgcgtagcctggcagagccgtgggccgacaccaccacgccggccggccgcatggtgttgaccgtgttcgccggcattgccgagttcgagcgttccctaatcatcgaccgcacccggagcgggcgcgaggccgccaaggcccgaggcgtgaagtttggcccccgccctaccctcaccccggcacagatcgcgcacgcccgcgagctgatcgaccaggaaggccgcaccgtgaaagaggcggctgcactgcttggcgtgcatcgctcgaccctgtaccgcgcacttgagcgcagcgaggaagtgacgcccaccgaggccaggcggcgcggtgccttccgtgaggacgcattgaccgaggccgacgccctggcggccgccgagaatgaacgccaagaggaacaagcatgaaaccgcaccaggacggccaggacgaaccgtttttcattaccgaagagatcgaggcggagatgatcgcggccgggtacgtgttcgagccgcccgcgcacgtctcaaccgtgcggctgcatgaaatcctggccggtttgtctgatgccaagctggcggcctggccggccagcttggccgctgaagaaaccgagcgccgccgtctaaaaaggtgatgtgtatttgagtaaaacagcttgcgtcatgcggtcgctgcgtatatgatgcgatgagtaaataaacaaatacgcaaggggaacgcatgaaggttatcgctgtacttaaccagaaaggcgggtcaggcaagacgaccatcgcaacccatctagcccgcgccctgcaactcgccggggccgatgttctgttagtcgattccgatccccagggcagtgcccgcgattgggcggccgtgcgggaagatcaaccgctaaccgttgtcggcatcgaccgcccgacgattgaccgcgacgtgaaggccatcggccggcgcgacttcgtagtgatcgacggagcgccccaggcggcggacttggctgtgtccgcgatcaaggcagccgacttcgtgctgattccggtgcagccaagcccttacgacatatgggccaccgccgacctggtggagctggttaagcagcgcattgaggtcacggatggaaggctacaagcggcctttgtcgtgtcgcgggcgatcaaaggcacgcgcatcggcggtgaggttgccgaggcgctggccgggtacgagctgcccattcttgagtcccgtatcacgcagcgcgtgagctacccaggcactgccgccgccggcacaaccgttcttgaatcagaacccgagggcgacgctgcccgcgaggtccaggcgctggccgctgaaattaaatcaaaactcatttgagttaatgaggtaaagagaaaatgagcaaaagcacaaacacgctaagtgccggccgtccgagcgcacgcagcagcaaggctgcaacgttggccagcctggcagacacgccagccatgaagcgggtcaactttcagttgccggcggaggatcacaccaagctgaagatgtacgcggtacgccaaggcaagaccattaccgagctgctatctgaatacatcgcgcagctaccagagtaaatgagcaaatgaataaatgagtagatgaattttagcggctaaaggaggcggcatggaaaatcaagaacaaccaggcaccgacgccgtggaatgccccatgtgtggaggaacgggcggttggccaggcgtaagcggctgggttgcctgccggccctgcaatggcactggaacccccaagcccgaggaatcggcgtgagcggtcgcaaaccatccggcccggtacaaatcggcgcggcgctgggtgatgacctggtggagaagttgaaggccgcgcaggccgcccagcggcaacgcatcgaggcagaagcacgccccggtgaatcgtggcaagcggccgctgatcgaatccgcaaagaatcccggcaaccgccggcagccggtgcgccgtcgattaggaagccgcccaagggcgacgagcaaccagattttttcgttccgatgctctatgacgtgggcacccgcgatagtcgcagcatcatggacgtggccgttttccgtctgtcgaagcgtgaccgacgagctggcgaggtgatccgctacgagcttccagacgggcacgtagaggtttccgcagggccggccggcatggccagtgtgtgggattacgacctggtactgatggcggtttcccatctaaccgaatccatgaaccgataccgggaagggaagggagacaagcccggccgcgtgttccgtccacacgttgcggacgtactcaagttctgccggcgagccgatggcggaaagcagaaagacgacctggtagaaacctgcattcggttaaacaccacgcacgttgccatgcagcgtacgaagaaggccaagaacggccgcctggtgacggtatccgagggtgaagccttgattagccgctacaagatcgtaaagagcgaaaccgggcggccggagtacatcgagatcgagctagctgattggatgtaccgcgagatcacagaaggcaagaacccggacgtgctgacggttcaccccgattactttttgatcgatcccggcatcggccgttttctctaccgcctggcacgccgcgccgcaggcaaggcagaagccagatggttgttcaagacgatctacgaacgcagtggcagcgccggagagttcaagaagttctgtttcaccgtgcgcaagctgatcgggtcaaatgacctgccggagtacgatttgaaggaggaggcggggcaggctggcccgatcctagtcatgcgctaccgcaacctgatcgagggcgaagcatccgccggttcctaatgtacggagcagatgctagggcaaattgccctagcaggggaaaaaggtcgaaaaggtctctttcctgtggatagcacgtacattgggaacccaaagccgtacattgggaaccggaacccgtacattgggaacccaaagccgtacattgggaaccggtcacacatgtaagtgactgatataaaagagaaaaaaggcgatttttccgcctaaaactctttaaaacttattaaaactcttaaaacccgcctggcctgtgcataactgtctggccagcgcacagccgaagagctgcaaaaagcgcctacccttcggtcgctgcgctccctacgccccgccgcttcgcgtcggcctatcgcggccgctggccgctcaaaaatggctggcctacggccaggcaatctaccagggcgcggacaagccgcgccgtcgccactcgaccgccggcgcccacatcaaggcaccctgcctcgcgcgtttcggtgatgacggtgaaaacctctgacacatgcagctcccggagacggtcacagcttgtctgtaagcggatgccgggagcagacaagcccgtcagggcgcgtcagcgggtgttggcgggtgtcggggcgcagccatgacccagtcacgtagcgatagcggagtgtatactggcttaactatgcggcatcagagcagattgtactgagagtgcaccatatgcggtgtgaaataccgcacagatgcgtaaggagaaaataccgcatcaggcgctcttccgcttcctcgctcactgactcgctgcgctcggtcgttcggctgcggcgagcggtatcagctcactcaaaggcggtaatacggttatccacagaatcaggggataacgcaggaaagaacatgtgagcaaaaggccagcaaaaggccaggaaccgtaaaaaggccgcgttgctggcgtttttccataggctccgcccccctgacgagcatcacaaaaatcgacgctcaagtcagaggtggcgaaacccgacaggactataaagataccaggcgtttccccctggaagctccctcgtgcgctctcctgttccgaccctgccgcttaccggatacctgtccgcctttctcccttcgggaagcgtggcgctttctcatagctcacgctgtaggtatctcagttcggtgtaggtcgttcgctccaagctgggctgtgtgcacgaaccccccgttcagcccgaccgctgcgccttatccggtaactatcgtcttgagtccaacccggtaagacacgacttatcgccactggcagcagccactggtaacaggattagcagagcgaggtatgtaggcggtgctacagagttcttgaagtggtggcctaactacggctacactagaaggacagtatttggtatctgcgctctgctgaagccagttaccttcggaaaaagagttggtagctcttgatccggcaaacaaaccaccgctggtagcggtggtttttttgtttgcaagcagcagattacgcgcagaaaaaaaggatctcaagaagatcctttgatcttttctacggggtctgacgctcagtggaacgaaaactcacgttaagggattttggtcatgcattctaggtactaaaacaattcatccagtaaaatataatattttattttctcccaatcaggcttgatccccagtaagtcaaaaaatagctcgacatactgttcttccccgatatcctccctgatcgaccggacgcagaaggcaatgtcataccacttgtccgccctgccgcttctcccaagatcaataaagccacttactttgccatctttcacaaagatgttgctgtctcccaggtcgccgtgggaaaagacaagttcctcttcgggcttttccgtctttaaaaaatcatacagctcgcgcggatctttaaatggagtgtcttcttcccagttttcgcaatccacatcggccagatcgttattcagtaagtaatccaattcggctaagcggctgtctaagctattcgtatagggacaatccgatatgtcgatggagtgaaagagcctgatgcactccgcatacagctcgataatcttttcagggctttgttcatcttcatactcttccgagcaaaggacgccatcggcctcactcatgagcagattgctccagccatcatgccgttcaaagtgcaggacctttggaacaggcagctttccttccagccatagcatcatgtccttttcccgttccacatcataggtggtccctttataccggctgtccgtcatttttaaatataggttttcattttctcccaccagcttatataccttagcaggagacattccttccgtatcttttacgcagcggtatttttcgatcagttttttcaattccggtgatattctcattttagccatttattatttccttcctcttttctacagtatttaaagataccccaagaagctaattataacaagacgaactccaattcactgttccttgcattctaaaaccttaaataccagaaaacagctttttcaaagttgttttcaaagttggcgtataacatagtatcgacggagccgattttgaaaccgcggtgatcacaggcagcaacgctctgtcatcgttacaatcaacatgctaccctccgcgagatcatccgtgtttcaaacccggcagcttagttgccgttcttccgaatagcatcggtaacatgagcaaagtctgccgccttacaacggctctcccgctgacgccgtcccggactgatgggctgcctgtatcgagtggtgattttgtgccgagctgccggtcggggagctgttggctggctggtggcaggatatattgtggtgtaaacaaattgacgcttagacaacttaataacacattgcggacgtttttaatgtactgaattaacgccgaatta

SEQ ID NO: 47 - DNA, 9303 bp, Artificial sequence
  plasmid pMTX447korr
  5'UTR (1964)..(2128)
  transit_peptide (2129)..(2236)
  CDS (2129)..(2236)
  transit_peptide (2314)..(2382)
  CDS (2314)..(2382)
  CDS (2383)..(2391): adapter
agcttggacaatcagtaaattgaacggagaatattattcataaaaatacgatagtaacgggtgatatattcattagaatgaaccgaaaccggcggtaaggatctgagctacacatgctcaggttttttacaacgtgcacaacagaattgaaagcaaatatcatgcgatcataggcgtctcgcatatctcattaaagcagggcatgccggtcgagtcaaatctcggtgacgggcaggaccggacggggcggtaccggcaggctgaagtccagctgccagaaacccacgtcatgccagttcccgtgcttgaagccggccgcccgcagcatgccgcggggggcatatccgagcgcctcgtgcatgcgcacgctcgggtcgttgggcagcccgatgacagcgaccacgctcttgaagccctgtgcctccagggacttcagcaggtgggtgtagagcgtggagcccagtcccgtccgctggtggcggggggagacgtacacggtcgactcggccgtccagtcgtaggcgttgcgtgccttccaggggcccgcgtaggcgatgccggcgacctcgccgtccacctcggcgacgagccagggatagcgctcccgcagacggacgaggtcgtccgtccactcctgcggttcctgcggctcggtacggaagttgaccgtgcttgtctcgatgtagtggttgacgatggtgcagaccgccggcatgtccgcctcggtggcacggcggatgtcggccgggcgtcgttctgggctcatggtagactcgacggatccacgtgtggaagatatgaatttttttgagaaactagataagattaatgaatatcggtgttttggttttttcttgtggccgtctttgtttatattgagatttttcaaatcagtgcgcaagacgtgacgtaagtatccgagtcagtttttatttttctactaatttggtcgaagctttgggcggatcctctagaattcgaatccaaaaattacggatatgaatataggcatatccgtatccgaattatccgtttgacagctagcaacgattgtacaattgcttctttaaaaaaggaagaaagaaagaaagaaaagaatcaacatcagcgttaacaaacggccccgttacggcccaaacggtcatatagagtaacggcgttaagcgttgaaagactcctatcgaaatacgtaaccgcaaacgtgtcatagtcagatcccctcttccttcaccgcctcaaacacaaaaataatcttctacagcctatatatacaacccccccttctatctctcctttctcacaattcatcatctttctttctctacccccaattttaagaaatcctctcttctcctcttcattttcaaggtaaatctctctctctctctctctctctgttattccttgttttaattaggtatgtattattgctagtttgttaatctgcttatcttatgtatgccttatgtgaatatctttatcttgttcatctcatccgtttagaagctataaatttgttgatttgactgtgtatctacacgtggttatgtttatatctaatcagatatgaatttcttcatattgttgcgtttgtgtgtaccaatccgaaatcgttgatttttttcatttaatcgtgtagctaattgtacgtatacatatggatctacgtatcaattgttcatctgtttgtgtttgtatgtatacagatctgaaaacatcacttctctcatctgattgtgttgttacatacatagatatagatctgttatatcattttttttattaattgtgtatatatatatgtgcatagatctggattacatgattgtgattatttacatgattttgttatttacgtatgtatatatgtagatctggactttttggagttgttgacttgattgtatttgtgtgtgtatatgtgtgttctgatcttgatatgttatgtatgtgcagcccaaacgcataaacttatcttcatagttgccactccaatttgctccttgaatctcctccacccaatacataatccactcctccatcacccacttcactactaaatcaaacttaactctgtttttctctctcctcctttcatttcttattcttccaatcatcgtactccgccatgaccaccgctgtcaccgccgctgtttctttcccctctaccaaaaccacctctctctccgcccgaagctcctccgtcatttcccctgacaaaatcagctacaaaaaggtgattcccaatttcactgtgttttttattaataatttgttattttgatgatgagatgattaatttgggtgctgcaggttcctttgtactacaggaatgtatctgcaactgggaaaatgggacccatcagggcccagatcgcctcttgctcttccatggcaatgattaattaacgaagagcaagagctcgaatttccccgatcgttcaaacatttggcaataaagtttcttaagattgaatcctgttgccggtcttgcgatgattatcatataatttctgttgaattacgttaagcatgtaataattaacatgtaatgcatgacgttatttatgagatgggtttttatgattagagtcccgcaattatacatttaatacgcgatagaaaacaaaatatagcgcgcaaactaggataaattatcgcgcgcggtgtcatctatgttactagatcgggaattggcatgcaagcttggcactggccgtcgttttacaacgtcgtgactgggaaaaccctggcgttacccaacttaatcgccttgcagcacatccccctttcgccagctggcgtaatagcgaagaggcccgcaccgatcgcccttcccaacagttgcgcagcctgaatggcgaatgctagagcagcttgagcttggatcagattgtcgtttcccgccttcagtttaaactatcagtgtttgacaggatatattggcgggtaaacctaagagaaaagagcgtttattagaataatcggatatttaaaagggcgtgaaaaggtttatccgttcgtccatttgtatgtgcatgccaaccacagggttcccctcgggatcaaagtactttgatccaacccctccgctgctatagtgcagtcggcttctgacgttcagtgcagccgtcttctgaaaacgacatgtcgcacaagtcctaagttacgcgacaggctgccgccctgcccttttcctggcgttttcttgtcgcgtgttttagtcgcataaagtagaatacttgcgactagaaccggagacattacgccatgaacaagagcgccgccgctggcctgctgggctatgcccgcgtcagcaccgacgaccaggacttgaccaaccaacgggccgaactgcacgcggccggctgcaccaagctgttttccgagaagatcaccggcaccaggcgcgaccgcccggagctggccaggatgcttgaccacctacgccctggcgacgttgtgacagtgaccaggctagaccgcctggcccgcagcacccgcgacctactggacattgccgagcgcatccaggaggccggcgcgggcctgcgtagcctggcagagccgtgggccgacaccaccacgccggccggccgcatggtgttgaccgtgttcgccggcattgccgagttcgagcgttccctaatcatcgaccgcacccggagcgggcgcgaggccgccaaggcccgaggcgtgaagtttggcccccgccctaccctcaccccggcacagatcgcgcacgcccgcgagctgatcgaccaggaaggccgcaccgtgaaagaggcggctgcactgcttggcgtgcatcgctcgaccctgtaccgcgcacttgagcgcagcgaggaagtgacgcccaccgaggccaggcggcgcggtgccttccgtgaggacgcattgaccgaggccgacgccctggcggccgccgagaatgaacgccaagaggaacaagcatgaaaccgcaccaggacggccaggacgaaccgtttttcattaccgaagagatcgaggcggagatgatcgcggccgggtacgtgttcgagccgcccgcgcacgtctcaaccgtgcggctgcatgaaatcctggccggtttgtctgatgccaagctggcggcctggccggccagcttggccgctgaagaaaccgagcgccgccgtctaaaaaggtgatgtgtatttgagtaaaacagcttgcgtcatgcggtcgctgcgtatatgatgcgatgagtaaataaacaaatacgcaaggggaacgcatgaaggttatcgctgtacttaaccagaaaggcgggtcaggcaagacgaccatcgcaacccatctagcccgcgccctgcaactcgccggggccgatgttctgttagtcgattccgatccccagggcagtgcccgcgattgggcggccgtgcgggaagatcaaccgctaaccgttgtcggcatcgaccgcccgacgattgaccgcgacgtgaaggccatcggccggcgcgacttcgtagtgatcgacggagcgccccaggcggcggacttggctgtgtccgcgatcaaggcagccgacttcgtgctgattccggtgcagccaagcccttacgacatatgggccaccgccgacctggtggagctggttaagcagcgcattgaggtcacggatggaaggctacaagcggcctttgtcgtgtcgcgggcgatcaaaggcacgcgcatcggcggtgaggttgccgaggcgctggccgggtacgagctgcccattcttgagtcccgtatcacgcagcgcgtgagctacccaggcactgccgccgccggcacaaccgttcttgaatcagaacccgagggcgacgctgcccgcgaggtccaggcgctggccgctgaaattaaatcaaaactcatttgagttaatgaggtaaagagaaaatgagcaaaagcacaaacacgctaagtgccggccgtccgagcgcacgcagcagcaaggctgcaacgttggccagcctggcagacacgccagccatgaagcgggtcaactttcagttgccggcggaggatcacaccaagctgaagatgtacgcggtacgccaaggcaagaccattaccgagctgctatctgaatacatcgcgcagctaccagagtaaatgagcaaatgaataaatgagtagatgaattttagcggctaaaggaggcggcatggaaaatcaagaacaaccaggcaccgacgccgtggaatgccccatgtgtggaggaacgggcggttggccaggcgtaagcggctgggttgtctgccggccctgcaatggcactggaacccccaagcccgaggaatcggcgtgacggtcgcaaaccatccggcccggtacaaatcggcgcggcgctgggtgatgacctggtggagaagttgaaggccgcgcaggccgcccagcggcaacgcatcgaggcagaagcacgccccggtgaatcgtggcaagcggccgctgatcgaatccgcaaagaatcccggcaaccgccggcagccggtgcgccgtcgattaggaagccgcccaagggcgacgagcaaccagattttttcgttccgatgctctatgacgtgggcacccgcgatagtcgcagcatcatggacgtggccgttttccgtctgtcgaagcgtgaccgacgagctggcgaggtgatccgctacgagcttccagacgggcacgtagaggtttccgcagggccggccggcatggccagtgtgtgggattacgacctggtactgatggcggtttcccatctaaccgaatccatgaaccgataccgggaagggaagggagacaagcccggccgcgtgttccgtccacacgttgcggacgtactcaagttctgccggcgagccgatggcggaaagcagaaagacgacctggtagaaacctgcattcggttaaacaccacgcacgttgccatgcagcgtacgaagaaggccaagaacggccgcctggtgacggtatccgagggtgaagccttgattagccgctacaagatcgtaaagagcgaaaccgggcggccggagtacatcgagatcgagctagctgattggatgtaccgcgagatcacagaaggcaagaacccggacgtgctgacggttcaccccgattactttttgatcgatcccggcatcggccgttttctctaccgcctggcacgccgcgccgcaggcaaggcagaagccagatggttgttcaagacgatctacgaacgcagtggcagcgccggagagttcaagaagttctgtttcaccgtgcgcaagctgatcgggtcaaatgacctgccggagtacgatttgaaggaggaggcggggcaggctggcccgatcctagtcatgcgctaccgcaacctgatcgagggcgaagcatccgccggttcctaatgtacggagcagatgctagggcaaattgccctagcaggggaaaaaggtcgaaaaggtctctttcctgtggatagcacgtacattgggaacccaaagccgtacattgggaaccggaacccgtacattgggaacccaaagccgtacattgggaaccggtcacacatgtaagtgactgatataaaagagaaaaaaggcgatttttccgcctaaaactctttaaaacttattaaaactcttaaaacccgcctggcctgtgcataactgtctggccagcgcacagccgaagagctgcaaaaagcgcctacccttcggtcgctgcgctccctacgccccgccgcttcgcgtcggcctatcgcggccgctggccgctcaaaaatggctggcctacggccaggcaatctaccagggcgcggacaagccgcgccgtcgccactcgaccgccggcgcccacatcaaggcaccctgcctcgcgcgtttcggtgatgacggtgaaaacctctgacacatgcagctcccggagacggtcacagcttgtctgtaagcggatgccgggagcagacaagcccgtcagggcgcgtcagcgggtgttggcgggtgtcggggcgcagccatgacccagtcacgtagcgatagcggagtgtatactggcttaactatgcggcatcagagcagattgtactgagagtgcaccatatgcggtgtgaaataccgcacagatgcgtaaggagaaaataccgcatcaggcgctcttccgcttcctcgctcactgactcgctgcgctcggtcgttcggctgcggcgagcggtatcagctcactcaaaggcggtaatacggttatccacagaatcaggggataacgcaggaaagaacatgtgagcaaaaggccagcaaaaggccaggaaccgtaaaaaggccgcgttgctggcgtttttccataggctccgcccccctgacgagcatcacaaaaatcgacgctcaagtcagaggtggcgaaacccgacaggactataaagataccaggcgtttccccctggaagctccctcgtgcgctctcctgttccgaccctgccgcttaccggatacctgtccgcctttctcccttcgggaagcgtggcgctttctcatagctcacgctgtaggtatctcagttcggtgtaggtcgttcgctccaagctgggctgtgtgcacgaaccccccgttcagcccgaccgctgcgccttatccggtaactatcgtcttgagtccaacccggtaagacacgacttatcgccactggcagcagccactggtaacaggattagcagagcgaggtatgtaggcggtgctacagagttcttgaagtggtggcctaactacggctacactagaaggacagtatttggtatctgcgctctgctgaagccagttaccttcggaaaaagagttggtagctcttgatccggcaaacaaaccaccgctggtagcggtggtttttttgtttgcaagcagcagattacgcgcagaaaaaaaggatctcaagaagatcctttgatcttttctacggggtctgacgctcagtggaacgaaaactcacgttaagggattttggtcatgcattctaggtactaaaacaattcatccagtaaaatataatattttattttctcccaatcaggcttgatccccagtaagtcaaaaaatagctcgacatactgttcttccccgatatcctccctgatcgaccggacgcagaaggcaatgtcataccacttgtccgccctgccgcttctcccaagatcaataaagccacttactttgccatctttcacaaagatgttgctgtctcccaggtcgccgtgggaaaagacaagttcctcttcgggcttttccgtctttaaaaaatcatacagctcgcgcggatctttaaatggagtgtcttcttcccagttttcgcaatccacatcggccagatcgttattcagtaagtaatccaattcggctaagcggctgtctaagctattcgtatagggacaatccgatatgtcgatggagtgaaagagcctgatgcactccgcatacagctcgataatcttttcagggctttgttcatcttcatactcttccgagcaaaggacgccatcggcctcactcatgagcagattgctccagccatcatgccgttcaaagtgcaggacctttggaacaggcagctttccttccagccatagcatcatgtccttttcccgttccacatcataggtggtccctttataccggctgtccgtcatttttaaatataggttttcattttctcccaccagcttatataccttagcaggagacattccttccgtatcttttacgcagcggtatttttcgatcagttttttcaattccggtgatattctcattttagccatttattatttccttcctcttttctacagtatttaaagataccccaagaagctaattataacaagacgaactccaattcactgttccttgcattctaaaaccttaaataccagaaaacagctttttcaaagttgttttcaaagttggcgtataacatagtatcgacggagccgattttgaaaccgcggtgatcacaggcagcaacgctctgtcatcgttacaatcaacatgctaccctccgcgagatcatccgtgtttcaaacccggcagcttagttgccgttcttccgaatagcatcggtaacatgagcaaagtctgccgccttacaacggctctcccgctgacgccgtcccggactgatgggctgcctgtatcgagtggtgattttgtgccgagctgccggtcggggagctgttggctggctggtggcaggatatattgtggtgtaaacaaattgacgcttagacaacttaataacacattgcggacgtttttaatgtactgaattaacgccgaatta

SEQ ID NO: 48 - protein, 62 aa, Artificial sequence; identical to SEQ ID NO: 43
  Synthetic Construct

SEQ ID NO: 49 - DNA, 8975 bp, Artificial sequence
  plasmid VC-MME445-1qcz
  transit_peptide (1964)..(2053)
  CDS (1964)..(2053)
  CDS (2054)..(2062): adapter
agcttggacaatcagtaaattgaacggagaatattattcataaaaatacgatagtaacgggtgatatattcattagaatgaaccgaaaccggcggtaaggatctgagctacacatgctcaggttttttacaacgtgcacaacagaattgaaagcaaatatcatgcgatcataggcgtctcgcatatctcattaaagcagggcatgccggtcgagtcaaatctcggtgacgggcaggaccggacggggcggtaccggcaggctgaagtccagctgccagaaacccacgtcatgccagttcccgtgcttgaagccggccgcccgcagcatgccgcggggggcatatccgagcgcctcgtgcatgcgcacgctcgggtcgttgggcagcccgatgacagcgaccacgctcttgaagccctgtgcctccagggacttcagcaggtgggtgtagagcgtggagcccagtcccgtccgctggtggcggggggagacgtacacggtcgactcggccgtccagtcgtaggcgttgcgtgccttccaggggcccgcgtaggcgatgccggcgacctcgccgtccacctcggcgacgagccagggatagcgctcccgcagacggacgaggtcgtccgtccactcctgcggttcctgcggctcggtacggaagttgaccgtgcttgtctcgatgtagtggttgacgatggtgcagaccgccggcatgtccgcctcggtggcacggcggatgtcggccgggcgtcgttctgggctcatggtagactcgacggatccacgtgtggaagatatgaatttttttgagaaactagataagattaatgaatatcggtgttttggttttttcttgtggccgtctttgtttatattgagatttttcaaatcagtgcgcaagacgtgacgtaagtatccgagtcagtttttatttttctactaatttggtcgaagctttgggcggatcctctagaattcgaatccaaaaattacggatatgaatataggcatatccgtatccgaattatccgtttgacagctagcaacgattgtacaattgcttctttaaaaaaggaagaaagaaagaaagaaaagaatcaacatcagcgttaacaaacggccccgttacggcccaaacggtcatatagagtaacggcgttaagcgttgaaagactcctatcgaaatacgtaaccgcaaacgtgtcatagtcagatcccctcttccttcaccgcctcaaacacaaaaataatcttctacagcctatatatacaacccccccttctatctctcctttctcacaattcatcatctttctttctctacccccaattttaagaaatcctctcttctcctcttcattttcaaggtaaatctctctctctctctctctctctgttattccttgttttaattaggtatgtattattgctagtttgttaatctgcttatcttatgtatgccttatgtgaatatctttatcttgttcatctcatccgtttagaagctataaatttgttgatttgactgtgtatctacacgtggttatgtttatatctaatcagatatgaatttcttcatattgttgcgtttgtgtgtaccaatccgaaatcgttgatttttttcatttaatcgtgtagctaattgtacgtatacatatggatctacgtatcaattgttcatctgtttgtgtttgtatgtatacagatctgaaaacatcacttctctcatctgattgtgttgttacatacatagatatagatctgttatatcattttttttattaattgtgtatatatatatgtgcatagatctggattacatgattgtgattatttacatgattttgttatttacgtatgtatatatgtagatctggactttttggagttgttgacttgattgtatttgtgtgtgtatatgtgtgttctgatcttgatatgttatgtatgtgcagcccaaacatgcagaggtttttctccgccagatcgattctcggttacgccgtcaagacgcggaggaggtctttctcttctcgttcttcgtctctcctttgctcttccatggcaatgattaattaacgaagagcaagagctcgaatttccccgatcgttcaaacatttggcaataaagtttcttaagattgaatcctgttgccggtcttgcgatgattatcatataatttctgttgaattacgttaagcatgtaataattaacatgtaatgcatgacgttatttatgagatgggtttttatgattagagtcccgcaattatacatttaatacgcgatagaaaacaaaatatagcgcgcaaactaggataaattatcgcgcgcggtgtcatctatgttactagatcgggaattggcatgcaagcttggcactggccgtcgttttacaacgtcgtgactgggaaaaccctggcgttacccaacttaatcgccttgcagcacatccccctttcgccagctggcgtaatagcgaagaggcccgcaccgatcgcccttcccaacagttgcgcagcctgaatggcgaatgctagagcagcttgagcttggatcagattgtcgtttcccgccttcagtttaaactatcagtgtttgacaggatatattggcgggtaaacctaagagaaaagagcgtttattagaataatcggatatttaaaagggcgtgaaaaggtttatccgttcgtccatttgtatgtgcatgccaaccacagggttcccctcgggatcaaagtactttgatccaacccctccgctgctatagtgcagtcggcttctgacgttcagtgcagccgtcttctgaaaacgacatgtcgcacaagtcctaagttacgcgacaggctgccgccctgcccttttcctggcgttttcttgtcgcgtgttttagtcgcataaagtagaatacttgcgactagaaccggagacattacgccatgaacaagagcgccgccgctggcctgctgggctatgcccgcgtcagcaccgacgaccaggacttgaccaaccaacgggccgaactgcacgcggccggctgcaccaagctgttttccgagaagatcaccggcaccaggcgcgaccgcccggagctggccaggatgcttgaccacctacgccctggcgacgttgtgacagtgaccaggctagaccgcctggcccgcagcacccgcgacctactggacattgccgagcgcatccaggaggccggcgcgggcctgcgtagcctggcagagccgtgggccgacaccaccacgccggccggccgcatggtgttgaccgtgttcgccggcattgccgagttcgagcgttccctaatcatcgaccgcacccggagcgggcgcgaggccgccaaggcccgaggcgtgaagtttggcccccgccctaccctcaccccggcacagatcgcgcacgcccgcgagctgatcgaccaggaaggccgcaccgtgaaagaggcggctgcactgcttggcgtgcatcgctcgaccctgtaccgcgcacttgagcgcagcgaggaagtgacgcccaccgaggccaggcggcgcggtgccttccgtgaggacgcattgaccgaggccgacgccctggcggccgccgagaatgaacgccaagaggaacaagcatgaaaccgcaccaggacggccaggacgaaccgtttttcattaccgaagagatcgaggcggagatgatcgcggccgggtacgtgttcgagccgcccgcgcacgtctcaaccgtgcggctgcatgaaatcctggccggtttgtctgatgccaagctggcggcctggccggccagcttggccgctgaagaaaccgagcgccgccgtctaaaaaggtgatgtgtatttgagtaaaacagcttgcgtcatgcggtcgctgcgtatatgatgcgatgagtaaataaacaaatacgcaaggggaacgcatgaaggttatcgctgtacttaaccagaaaggcgggtcaggcaagacgaccatcgcaacccatctagcccgcgccctgcaactcgccggggccgatgttctgttagtcgattccgatccccagggcagtgcccgcgattgggcggccgtgcgggaagatcaaccgctaaccgttgtcggcatcgaccgcccgacgattgaccgcgacgtgaaggccatcggccggcgcgacttcgtagtgatcgacggagcgccccaggcggcggacttggctgtgtccgcgatcaaggcagccgacttcgtgctgattccggtgcagccaagcccttacgacatatgggccaccgccgacctggtggagctggttaagcagcgcattgaggtcacggatggaaggctacaagcggcctttgtcgtgtcgcgggcgatcaaaggcacgcgcatcggcggtgaggttgccgaggcgctggccgggtacgagctgcccattcttgagtcccgtatcacgcagcgcgtgagctacccaggcactgccgccgccggcacaaccgttcttgaatcagaacccgagggcgacgctgcccgcgaggtccaggcgctggccgctgaaattaaatcaaaactcatttgagttaatgaggtaaagagaaaatgagcaaaagcacaaacacgctaagtgccggccgtccgagcgcacgcagcagcaaggctgcaacgttggccagcctggcagacacgccagccatgaagcgggtcaactttcagttgccggcggaggatcacaccaagctgaagatgtacgcggtacgccaaggcaagaccattaccgagctgctatctgaatacatcgcgcagctaccagagtaaatgagcaaatgaataaatgagtagatgaattttagcggctaaaggaggcggcatggaaaatcaagaacaaccaggcaccgacgccgtggaatgccccatgtgtggaggaacgggcggttggccaggcgtaagcggctgggttgcctgccggccctgcaatggcactggaacccccaagcccgaggaatcggcgtgagcggtcgcaaaccatccggcccggtacaaatcggcgcggcgctgggtgatgacctggtggagaagttgaaggccgcgcaggccgcccagcggcaacgcatcgaggcagaagcacgccccggtgaatcgtggcaagcggccgctgatcgaatccgcaaagaatcccggcaaccgccggcagccggtgcgccgtcgattaggaagccgcccaagggcgacgagcaaccagattttttcgttccgatgctctatgacgtgggcacccgcgatagtcgcagcatcatggacgtggccgttttccgtctgtcgaagcgtgaccgacgagctggcgaggtgatccgctacgagcttccagacgggcacgtagaggtttccgcagggccggccggcatggccagtgtgtgggattacgacctggtactgatggcggtttcccatctaaccgaatccatgaaccgataccgggaagggaagggagacaagcccggccgcgtgttccgtccacacgttgcggacgtactcaagttctgccggcgagccgatggcggaaagcagaaagacgacctggtagaaacctgcattcggttaaacaccacgcacgttgccatgcagcgtacgaagaaggccaagaacggccgcctggtgacggtatccgagggtgaagccttgattagccgctacaagatcgtaaagagcgaaaccgggcggccggagtacatcgagatcgagctagctgattggatgtaccgcgagatcacagaaggcaagaacccggacgtgctgacggttcaccccgattactttttgatcgatcccggcatcggccgttttctctaccgcctggcacgccgcgccgcaggcaaggcagaagccagatggttgttcaagacgatctacgaacgcagtggcagcgccggagagttcaagaagttctgtttcaccgtgcgcaagctgatcgggtcaaatgacctgccggagtacgatttgaaggaggaggcggggcaggctggcccgatcctagtcatgcgctaccgcaacctgatcgagggcgaagcatccgccggttcctaatgtacggagcagatgctagggcaaattgccctagcaggggaaaaaggtcgaaaaggtctctttcctgtggatagcacgtacattgggaacccaaagccgtacattgggaaccggaacccgtacattgggaacccaaagccgtacattgggaaccggtcacacatgtaagtgactgatataaaagagaaaaaaggcgatttttccgcctaaaactctttaaaacttattaaaactcttaaaacccgcctggcctgtgcataactgtctggccagcgcacagccgaagagctgcaaaaagcgcctacccttcggtcgctgcgctccctacgccccgccgcttcgcgtcggcctatcgcggccgctggccgctcaaaaatggctggcctacggccaggcaatctaccagggcgcggacaagccgcgccgtcgccactcgaccgccggcgcccacatcaaggcaccctgcctcgcgcgtttcggtgatgacggtgaaaacctctgacacatgcagctcccggagacggtcacagcttgtctgtaagcggatgccgggagcagacaagcccgtcagggcgcgtcagcgggtgttggcgggtgtcggggcgcagccatgacccagtcacgtagcgatagcggagtgtatactggcttaactatgcggcatcagagcagattgtactgagagtgcaccatatgcggtgtgaaataccgcacagatgcgtaaggagaaaataccgcatcaggcgctcttccgcttcctcgctcactgactcgctgcgctcggtcgttcggctgcggcgagcggtatcagctcactcaaaggcggtaatacggttatccacagaatcaggggataacgcaggaaagaacatgtgagcaaaaggccagcaaaaggccaggaaccgtaaaaaggccgcgttgctggcgtttttccataggctccgcccccctgacgagcatcacaaaaatcgacgctcaagtcagaggtggcgaaacccgacaggactataaagataccaggcgtttccccctggaagctccctcgtgcgctctcctgttccgaccctgccgcttaccggatacctgtccgcctttctcccttcgggaagcgtggcgctttctcatagctcacgctgtaggtatctcagttcggtgtaggtcgttcgctccaagctgggctgtgtgcacgaaccccccgttcagcccgaccgctgcgccttatccggtaactatcgtcttgagtccaacccggtaagacacgacttatcgccactggcagcagccactggtaacaggattagcagagcgaggtatgtaggcggtgctacagagttcttgaagtggtggcctaactacggctacactagaaggacagtatttggtatctgcgctctgctgaagccagttaccttcggaaaaagagttggtagctcttgatccggcaaacaaaccaccgctggtagcggtggtttttttgtttgcaagcagcagattacgcgcagaaaaaaaggatctcaagaagatcctttgatcttttctacggggtctgacgctcagtggaacgaaaactcacgttaagggattttggtcatgcattctaggtactaaaacaattcatccagtaaaatataatattttattttctcccaatcaggcttgatccccagtaagtcaaaaaatagctcgacatactgttcttccccgatatcctccctgatcgaccggacgcagaaggcaatgtcataccacttgtccgccctgccgcttctcccaagatcaataaagccacttactttgccatctttcacaaagatgttgctgtctcccaggtcgccgtgggaaaagacaagttcctcttcgggcttttccgtctttaaaaaatcatacagctcgcgcggatctttaaatggagtgtcttcttcccagttttcgcaatccacatcggccagatcgttattcagtaagtaatccaattcggctaagcggctgtctaagctattcgtatagggacaatccgatatgtcgatggagtgaaagagcctgatgcactccgcatacagctcgataatcttttcagggctttgttcatcttcatactcttccgagcaaaggacgccatcggcctcactcatgagcagattgctccagccatcatgccgttcaaagtgcaggacctttggaacaggcagctttccttccagccatagcatcatgtccttttcccgttccacatcataggtggtccctttataccggctgtccgtcatttttaaatataggttttcattttctcccaccagcttatataccttagcaggagacattccttccgtatcttttacgcagcggtatttttcgatcagttttttcaattccggtgatattctcattttagccatttattatttccttcctcttttctacagtatttaaagataccccaagaagctaattataacaagacgaactccaattcactgttccttgcattctaaaaccttaaataccagaaaacagctttttcaaagttgttttcaaagttggcgtataacatagtatcgacggagccgattttgaaaccgcggtgatcacaggcagcaacgctctgtcatcgttacaatcaacatgctaccctccgcgagatcatccgtgtttcaaacccggcagcttagttgccgttcttccgaatagcatcggtaacatgagcaaagtctgccgccttacaacggctctcccgctgacgccgtcccggactgatgggctgcctgtatcgagtggtgattttgtgccgagctgccggtcggggagctgttggctggctggtggcaggatatattgtggtgtaaacaaattgacgcttagacaacttaataacacattgcggacgtttttaatgtactgaattaacgccgaatta

SEQ ID NO: 50 - protein, 33 aa, Artificial sequence; identical to SEQ ID NO: 45
  Synthetic Construct

SEQ ID NO: 51 - DNA, 8588 bp, Artificial sequence
  plasmid VC-MME289-1qcz
gctttgggcggatcctctagaggacaatcagtaaattgaacggagaatattattcataaaaatacgatagtaacgggtgatatattcattagaatgaaccgaaaccggcggtaaggatctgagctacacatgctcaggttttttacaacgtgcacaacagaattgaaagcaaatatcatgcgatcataggcgtctcgcatatctcattaaagcagggcatgccggtcgagtcaaatctcggtgacgggcaggaccggacggggcggtaccggcaggctgaagtccagctgccagaaacccacgtcatgccagttcccgtgcttgaagccggccgcccgcagcatgccgcggggggcatatccgagcgcctcgtgcatgcgcacgctcgggtcgttgggcagcccgatgacagcgaccacgctcttgaagccctgtgcctccagggacttcagcaggtgggtgtagagcgtggagcccagtcccgtccgctggtggcggggggagacgtacacggtcgactcggccgtccagtcgtaggcgttgcgtgccttccaggggcccgcgtaggcgatgccggcgacctcgccgtccacctcggcgacgagccagggatagcgctcccgcagacggacgaggtcgtccgtccactcctgcggttcctgcggctcggtacggaagttgaccgtgcttgtctcgatgtagtggttgacgatggtgcagaccgccggcatgtccgcctcggtggcacggcggatgtcggccgggcgtcgttctgggctcatggtagactcgacggatccacgtgtggaagatatgaatttttttgagaaactagataagattaatgaatatcggtgttttggttttttcttgtggccgtctttgtttatattgagatttttcaaatcagtgcgcaagacgtgacgtaagtatccgagtcagtttttatttttctactaatttggtcgaatctagactgcagcaaatttacacattgccactaaacgtctaaacccttgtaatttgtttttgttttactatgtgtgttatgtatttgatttgcgataaatttttatatttggtactaaatttataacaccttttatgctaacgtttgccaacacttagcaatttgcaagttgattaattgattctaaattatttttgtcttctaaatacatatactaatcaactggaaatgtaaatatttgctaatatttctactataggagaattaaagtgagtgaatatggtaccacaaggtttggagatttaattgttgcaatgctgcatggatggcatatacaccaaacattcaataattcttgaggataataatggtaccacacaagatttgaggtgcatgaacgtcacgtggacaaaaggtttagtaatttttcaagacaacaatgttaccacacacaagttttgaggtgcatgcatggatgccctgtggaaagtttaaaaatattttggaaatgatttgcatggaagccatgtgtaaaaccatgacatccacttggaggatgcaataatgaagaaaactacaaatttacatgcaactagttatgcatgtagtctatataatgaggattttgcaatactttcattcatacacactcactaagttttacacgattataatttcttcatagccacccgggttgctcttccatggcaatgattaattaacgaagagcaagagctcgaatttccccgatcgttcaaacatttggcaataaagtttcttaagattgaatcctgttgccggtcttgcgatgattatcatataatttctgttgaattacgttaagcatgtaataattaacatgtaatgcatgacgttatttatgagatgggtttttatgattagagtcccgcaattatacatttaatacgcgatagaaaacaaaatatagcgcgcaaactaggataaattatcgcgcgcggtgtcatctatgttactagatcgggaattggcatgcaagcttggcactggccgtcgttttacaacgtcgtgactgggaaaaccctggcgttacccaacttaatcgccttgcagcacatccccctttcgccagctggcgtaatagcgaagaggcccgcaccgatcgcccttcccaacagttgcgcagcctgaatggcgaatgctagagcagcttgagcttggatcagattgtcgtttcccgccttcagtttaaactatcagtgtttgacaggatatattggcgggtaaacctaagagaaaagagcgtttattagaataatcggatatttaaaagggcgtgaaaaggtttatccgttcgtccatttgtatgtgcatgccaaccacagggttcccctcgggatcaaagtactttgatccaacccctccgctgctatagtgcagtcggcttctgacgttcagtgcagccgtcttctgaaaacgacatgtcgcacaagtcctaagttacgcgacaggctgccgccctgcccttttcctggcgttttcttgtcgcgtgttttagtcgcataaagtagaatacttgcgactagaaccggagacattacgccatgaacaagagcgccgccgctggcctgctgggctatgcccgcgtcagcaccgacgaccaggacttgaccaaccaacgggccgaactgcacgcggccggctgcaccaagctgttttccgagaagatcaccggcaccaggcgcgaccgcccggagctggccaggatgcttgaccacctacgccctggcgacgttgtgacagtgaccaggctagaccgcctggcccgcagcacccgcgacctactggacattgccgagcgcatccaggaggccggcgcgggcctgcgtagcctggcagagccgtgggccgacaccaccacgccggccggccgcatggtgttgaccgtgttcgccggcattgccgagttcgagcgttccctaatcatcgaccgcacccggagcgggcgcgaggccgccaaggcccgaggcgtgaagtttggcccccgccctaccctcaccccggcacagatcgcgcacgcccgcgagctgatcgaccaggaaggccgcaccgtgaaagaggcggctgcactgcttggcgtgcatcgctcgaccctgtaccgcgcacttgagcgcagcgaggaagtgacgcccaccgaggccaggcggcgcggtgccttccgtgaggacgcattgaccgaggccgacgccctggcggccgccgagaatgaacgccaagaggaacaagcatgaaaccgcaccaggacggccaggacgaaccgtttttcattaccgaagagatcgaggcggagatgatcgcggccgggtacgtgttcgagccgcccgcgcacgtctcaaccgtgcggctgcatgaaatcctggccggtttgtctgatgccaagctggcggcctggccggccagcttggccgctgaagaaaccgagcgccgccgtctaaaaaggtgatgtgtatttgagtaaaacagcttgcgtcatgcggtcgctgcgtatatgatgcgatgagtaaataaacaaatacgcaaggggaacgcatgaaggttatcgctgtacttaaccagaaaggcgggtcaggcaagacgaccatcgcaacccatctagcccgcgccctgcaactcgccggggccgatgttctgttagtcgattccgatccccagggcagtgcccgcgattgggcggccgtgcgggaagatcaaccgctaaccgttgtcggcatcgaccgcccgacgattgaccgcgacgtgaaggccatcggccggcgcgacttcgtagtgatcgacggagcgccccaggcggcggacttggctgtgtccgcgatcaaggcagccgacttcgtgctgattccggtgcagccaagcccttacgacatatgggccaccgccgacctggtggagctggttaagcagcgcattgaggtcacggatggaaggctacaagcggcctttgtcgtgtcgcgggcgatcaaaggcacgcgcatcggcggtgaggttgccgaggcgctggccgggtacgagctgcccattcttgagtcccgtatcacgcagcgcgtgagctacccaggcactgccgccgccggcacaaccgttcttgaatcagaacccgagggcgacgctgcccgcgaggtccaggcgctggccgctgaaattaaatcaaaactcatttgagttaatgaggtaaagagaaaatgagcaaaagcacaaacacgctaagtgccggccgtccgagcgcacgcagcagcaaggctgcaacgttggccagcctggcagacacgccagccatgaagcgggtcaactttcagttgccggcggaggatcacaccaagctgaagatgtacgcggtacgccaaggcaagaccattaccgagctgctatctgaatacatcgcgcagctaccagagtaaatgagcaaatgaataaatgagtagatgaattttagcggctaaaggaggcggcatggaaaatcaagaacaaccaggcaccgacgccgtggaatgccccatgtgtggaggaacgggcggttggccaggcgtaagcggctgggttgcctgccggccctgcaatggcactggaacccccaagcccgaggaatcggcgtgagcggtcgcaaaccatccggcccggtacaaatcggcgcggcgctgggtgatgacctggtggagaagttgaaggccgcgcaggccgcccagcggcaacgcatcgaggcagaagcacgccccggtgaatcgtggcaagcggccgctgatcgaatccgcaaagaatcccggcaaccgccggcagccggtgcgccgtcgattaggaagccgcccaagggcgacgagcaaccagattttttcgttccgatgctctatgacgtgggcacccgcgatagtcgcagcatcatggacgtggccgttttccgtctgtcgaagcgtgaccgacgagctggcgaggtgatccgctacgagcttccagacgggcacgtagaggtttccgcagggccggccggcatggccagtgtgtgggattacgacctggtactgatggcggtttcccatctaaccgaatccatgaaccgataccgggaagggaagggagacaagcccggccgcgtgttccgtccacacgttgcggacgtactcaagttctgccggcgagccgatggcggaaagcagaaagacgacctggtagaaacctgcattcggttaaacaccacgcacgttgccatgcagcgtacgaagaaggccaagaacggccgcctggtgacggtatccgagggtgaagccttgattagccgctacaagatcgtaaagagcgaaaccgggcggccggagtacatcgagatcgagctagctgattggatgtaccgcgagatcacagaaggcaagaacccggacgtgctgacggttcaccccgattactttttgatcgatcccggcatcggccgttttctctaccgcctggcacgccgcgccgcaggcaaggcagaagccagatggttgttcaagacgatctacgaacgcagtggcagcgccggagagttcaagaagttctgtttcaccgtgcgcaagctgatcgggtcaaatgacctgccggagtacgatttgaaggaggaggcggggcaggctggcccgatcctagtcatgcgctaccgcaacctgatcgagggcgaagcatccgccggttcctaatgtacggagcagatgctagggcaaattgccctagcaggggaaaaaggtcgaaaaggtctctttcctgtggatagcacgtacattgggaacccaaagccgtacattgggaaccggaacccgtacattgggaacccaaagccgtacattgggaaccggtcacacatgtaagtgactgatataaaagagaaaaaaggcgatttttccgcctaaaactctttaaaacttattaaaactcttaaaacccgcctggcctgtgcataactgtctggccagcgcacagccgaagagctgcaaaaagcgcctacccttcggtcgctgcgctccctacgccccgccgcttcgcgtcggcctatcgcggccgctggccgctcaaaaatggctggcctacggccaggcaatctaccagggcgcggacaagccgcgccgtcgccactcgaccgccggcgcccacatcaaggcaccctgcctcgcgcgtttcggtgatgacggtgaaaacctctgacacatgcagctcccggagacggtcacagcttgtctgtaagcggatgccgggagcagacaagcccgtcagggcgcgtcagcgggtgttggcgggtgtcggggcgcagccatgacccagtcacgtagcgatagcggagtgtatactggcttaactatgcggcatcagagcagattgtactgagagtgcaccatatgcggtgtgaaataccgcacagatgcgtaaggagaaaataccgcatcaggcgctcttccgcttcctcgctcactgactcgctgcgctcggtcgttcggctgcggcgagcggtatcagctcactcaaaggcggtaatacggttatccacagaatcaggggataacgcaggaaagaacatgtgagcaaaaggccagcaaaaggccaggaaccgtaaaaaggccgcgttgctggcgtttttccataggctccgcccccctgacgagcatcacaaaaatcgacgctcaagtcagaggtggcgaaacccgacaggactataaagataccaggcgtttccccctggaagctccctcgtgcgctctcctgttccgaccctgccgcttaccggatacctgtccgcctttctcccttcgggaagcgtggcgctttctcatagctcacgctgtaggtatctcagttcggtgtaggtcgttcgctccaagctgggctgtgtgcacgaaccccccgttcagcccgaccgctgcgccttatccggtaactatcgtcttgagtccaacccggtaagacacgacttatcgccactggcagcagccactggtaacaggattagcagagcgaggtatgtaggcggtgctacagagttcttgaagtggtggcctaactacggctacactagaaggacagtatttggtatctgcgctctgctgaagccagttaccttcggaaaaagagttggtagctcttgatccggcaaacaaaccaccgctggtagcggtggtttttttgtttgcaagcagcagattacgcgcagaaaaaaaggatctcaagaagatcctttgatcttttctacggggtctgacgctcagtggaacgaaaactcacgttaagggattttggtcatgcattctaggtactaaaacaattcatccagtaaaatataatattttattttctcccaatcaggcttgatccccagtaagtcaaaaaatagctcgacatactgttcttccccgatatcctccctgatcgaccggacgcagaaggcaatgtcataccacttgtccgccctgccgcttctcccaagatcaataaagccacttactttgccatctttcacaaagatgttgctgtctcccaggtcgccgtgggaaaagacaagttcctcttcgggcttttccgtctttaaaaaatcatacagctcgcgcggatctttaaatggagtgtcttcttcccagttttcgcaatccacatcggccagatcgttattcagtaagtaatccaattcggctaagcggctgtctaagctattcgtatagggacaatccgatatgtcgatggagtgaaagagcctgatgcactccgcatacagctcgataatcttttcagggctttgttcatcttcatactcttccgagcaaaggacgccatcggcctcactcatgagcagattgctccagccatcatgccgttcaaagtgcaggacctttggaacaggcagctttccttccagccatagcatcatgtccttttcccgttccacatcataggtggtccctttataccggctgtccgtcatttttaaatataggttttcattttctcccaccagcttatataccttagcaggagacattccttccgtatcttttacgcagcggtatttttcgatcagttttttcaattccggtgatattctcattttagccatttattatttccttcctcttttctacagtatttaaagataccccaagaagctaattataacaagacgaactccaattcactgttccttgcattctaaaaccttaaataccagaaaacagctttttcaaagttgttttcaaagttggcgtataacatagtatcgacggagccgattttgaaaccgcggtgatcacaggcagcaacgctctgtcatcgttacaatcaacatgctaccctccgcgagatcatccgtgtttcaaacccggcagcttagttgccgttcttccgaatagcatcggtaacatgagcaaagtctgccgccttacaacggctctcccgctgacgccgtcccggactgatgggctgcctgtatcgagtggtgattttgtgccgagctgccggtcggggagctgttggctggctggtggcaggatatattgtggtgtaaacaaattgacgcttagacaacttaataacacattgcggacgtttttaatgtactgaattaacgccgaattaa

SEQ ID NO: 52 - DNA, 9007 bp, Artificial sequence
  plasmid VC-MME464-1qcz
  5'UTR (1666)..(1830)
  transit_peptide (1831)..(1938)
  CDS (1831)..(1938)
  transit_peptide (2016)..(2084)
  CDS (2016)..(2084)
  CDS (2085)..(2093): adapter
gctttgggcggatcctctagaggacaatcagtaaattgaacggagaatattattcataaaaatacgatagtaacgggtgatatattcattagaatgaaccgaaaccggcggtaaggatctgagctacacatgctcaggttttttacaacgtgcacaacagaattgaaagcaaatatcatgcgatcataggcgtctcgcatatctcattaaagcagggcatgccggtcgagtcaaatctcggtgacgggcaggaccggacggggcggtaccggcaggctgaagtccagctgccagaaacccacgtcatgccagttcccgtgcttgaagccggccgcccgcagcatgccgcggggggcatatccgagcgcctcgtgcatgcgcacgctcgggtcgttgggcagcccgatgacagcgaccacgctcttgaagccctgtgcctccagggacttcagcaggtgggtgtagagcgtggagcccagtcccgtccgctggtggcggggggagacgtacacggtcgactcggccgtccagtcgtaggcgttgcgtgccttccaggggcccgcgtaggcgatgccggcgacctcgccgtccacctcggcgacgagccagggatagcgctcccgcagacggacgaggtcgtccgtccactcctgcggttcctgcggctcggtacggaagttgaccgtgcttgtctcgatgtagtggttgacgatggtgcagaccgccggcatgtccgcctcggtggcacggcggatgtcggccgggcgtcgttctgggctcatggtagactcgacggatccacgtgtggaagatatgaatttttttgagaaactagataagattaatgaatatcggtgttttggttttttcttgtggccgtctttgtttatattgagatttttcaaatcagtgcgcaagacgtgacgtaagtatccgagtcagtttttatttttctactaatttggtcgaatctagactgcagcaaatttacacattgccactaaacgtctaaacccttgtaatttgtttttgttttactatgtgtgttatgtatttgatttgcgataaatttttatatttggtactaaatttataacaccttttatgctaacgtttgccaacacttagcaatttgcaagttgattaattgattctaaattatttttgtcttctaaatacatatactaatcaactggaaatgtaaatatttgctaatatttctactataggagaattaaagtgagtgaatatggtaccacaaggtttggagatttaattgttgcaatgctgcatggatggcatatacaccaaacattcaataattcttgaggataataatggtaccacacaagatttgaggtgcatgaacgtcacgtggacaaaaggtttagtaatttttcaagacaacaatgttaccacacacaagttttgaggtgcatgcatggatgccctgtggaaagtttaaaaatattttggaaatgatttgcatggaagccatgtgtaaaaccatgacatccacttggaggatgcaataatgaagaaaactacaaatttacatgcaactagttatgcatgtagtctatataatgaggattttgcaatactttcattcatacacactcactaagttttacacgattataatttcttcatagccacccaaacgcataaacttatcttcatagttgccactccaatttgctccttgaatctcctccacccaatacataatccactcctccatcacccacttcactactaaatcaaacttaactctgtttttctctctcctcctttcatttcttattcttccaatcatcgtactccgccatgaccaccgctgtcaccgccgctgtttctttcccctctaccaaaaccacctctctctccgcccgaagctcctccgtcatttcccctgacaaaatcagctacaaaaaggtgattcccaatttcactgtgttttttattaataatttgttattttgatgatgagatgattaatttgggtgctgcaggttcctttgtactacaggaatgtatctgcaactgggaaaatgggacccatcagggcccagatcgcctcttgctcttccatggcaatgattaattaacgaagagcaagagctcgaatttccccgatcgttcaaacatttggcaataaagtttcttaagattgaatcctgttgccggtcttgcgatgattatcatataatttctgttgaattacgttaagcatgtaataattaacatgtaatgcatgacgttatttatgagatgggtttttatgattagagtcccgcaattatacatttaatacgcgatagaaaacaaaatatagcgcgcaaactaggataaattatcgcgcgcggtgtcatctatgttactagatcgggaattggcatgcaagcttggcactggccgtcgttttacaacgtcgtgactgggaaaaccctggcgttacccaacttaatcgccttgcagcacatccccctttcgccagctggcgtaatagcgaagaggcccgcaccgatcgcccttcccaacagttgcgcagcctgaatggcgaatgctagagcagcttgagcttggatcagattgtcgtttcccgccttcagtttaaactatcagtgtttgacaggatatattggcgggtaaacctaagagaaaagagcgtttattagaataatcggatatttaaaagggcgtgaaaaggtttatccgttcgtccatttgtatgtgcatgccaaccacagggttcccctcgggatcaaagtactttgatccaacccctccgctgctatagtgcagtcggcttctgacgttcagtgcagccgtcttctgaaaacgacatgtcgcacaagtcctaagttacgcgacaggctgccgccctgcccttttcctggcgttttcttgtcgcgtgttttagtcgcataaagtagaatacttgcgactagaaccggagacattacgccatgaacaagagcgccgccgctggcctgctgggctatgcccgcgtcagcaccgacgaccaggacttgaccaaccaacgggccgaactgcacgcggccggctgcaccaagctgttttccgagaagatcaccggcaccaggcgcgaccgcccggagctggccaggatgcttgaccacctacgccctggcgacgttgtgacagtgaccaggctagaccgcctggcccgcagcacccgcgacctactggacattgccgagcgcatccaggaggccggcgcgggcctgcgtagcctggcagagccgtgggccgacaccaccacgccggccggccgcatggtgttgaccgtgttcgccggcattgccgagttcgagcgttccctaatcatcgaccgcacccggagcgggcgcgaggccgccaaggcccgaggcgtgaagtttggcccccgccctaccctcaccccggcacagatcgcgcacgcccgcgagctgatcgaccaggaaggccgcaccgtgaaagaggcggctgcactgcttggcgtgcatcgctcgaccctgtaccgcgcacttgagcgcagcgaggaagtgacgcccaccgaggccaggcggcgcggtgccttccgtgaggacgcattgaccgaggccgacgccctggcggccgccgagaatgaacgccaagaggaacaagcatgaaaccgcaccaggacggccaggacgaaccgtttttcattaccgaagagatcgaggcggagatgatcgcggccgggtacgtgttcgagccgcccgcgcacgtctcaaccgtgcggctgcatgaaatcctggccggtttgtctgatgccaagctggcggcctggccggccagcttggccgctgaagaaaccgagcgccgccgtctaaaaaggtgatgtgtatttgagtaaaacagcttgcgtcatgcggtcgctgcgtatatgatgcgatgagtaaataaacaaatacgcaaggggaacgcatgaaggttatcgctgtacttaaccagaaaggcgggtcaggcaagacgaccatcgcaacccatctagcccgcgccctgcaactcgccggggccgatgttctgttagtcgattccgatccccagggcagtgcccgcgattgggcggccgtgcgggaagatcaaccgctaaccgttgtcggcatcgaccgcccgacgattgaccgcgacgtgaaggccatcggccggcgcgacttcgtagtgatcgacggagcgccccaggcggcggacttggctgtgtccgcgatcaaggcagccgacttcgtgctgattccggtgcagccaagcccttacgacatatgggccaccgccgacctggtggagctggttaagcagcgcattgaggtcacggatggaaggctacaagcggcctttgtcgtgtcgcgggcgatcaaaggcacgcgcatcggcggtgaggttgccgaggcgctggccgggtacgagctgcccattcttgagtcccgtatcacgcagcgcgtgagctacccaggcactgccgccgccggcacaaccgttcttgaatcagaacccgagggcgacgctgcccgcgaggtccaggcgctggccgctgaaattaaatcaaaactcatttgagttaatgaggtaaagagaaaatgagcaaaagcacaaacacgctaagtgccggccgtccgagcgcacgcagcagcaaggctgcaacgttggccagcctggcagacacgccagccatgaagcgggtcaactttcagttgccggcggaggatcacaccaagctgaagatgtacgcggtacgccaaggcaagaccattaccgagctgctatctgaatacatcgcgcagctaccagagtaaatgagcaaatgaataaatgagtagatgaattttagcggctaaaggaggcggcatggaaaatcaagaacaaccaggcaccgacgccgtggaatgccccatgtgtggaggaacgggcggttggccaggcgtaagcggctgggttgcctgccggccctgcaatggcactggaacccccaagcccgaggaatcggcgtgagcggtcgcaaaccatccggcccggtacaaatcggcgcggcgctgggtgatgacctggtggagaagttgaaggccgcgcaggccgcccagcggcaacgcatcgaggcagaagcacgccccggtgaatcgtggcaagcggccgctgatcgaatccgcaaagaatcccggcaaccgccggcagccggtgcgccgtcgattaggaagccgcccaagggcgacgagcaaccagattttttcgttccgatgctctatgacgtgggcacccgcgatagtcgcagcatcatggacgtggccgttttccgtctgtcgaagcgtgaccgacgagctggcgaggtgatccgctacgagcttccagacgggcacgtagaggtttccgcagggccggccggcatggccagtgtgtgggattacgacctggtactgatggcggtttcccatctaaccgaatccatgaaccgataccgggaagggaagggagacaagcccggccgcgtgttccgtccacacgttgcggacgtactcaagttctgccggcgagccgatggcggaaagcagaaagacgacctggtagaaacctgcattcggttaaacaccacgcacgttgccatgcagcgtacgaagaaggccaagaacggccgcctggtgacggtatccgagggtgaagccttgattagccgctacaagatcgtaaagagcgaaaccgggcggccggagtacatcgagatcgagctagctgattggatgtaccgcgagatcacagaaggcaagaacccggacgtgctgacggttcaccccgattactttttgatcgatcccggcatcggccgttttctctaccgcctggcacgccgcgccgcaggcaaggcagaagccagatggttgttcaagacgatctacgaacgcagtggcagcgccggagagttcaagaagttctgtttcaccgtgcgcaagctgatcgggtcaaatgacctgccggagtacgatttgaaggaggaggcggggcaggctggcccgatcctagtcatgcgctaccgcaacctgatcgagggcgaagcatccgccggttcctaatgtacggagcagatgctagggcaaattgccctagcaggggaaaaaggtcgaaaaggtctctttcctgtggatagcacgtacattgggaacccaaagccgtacattgggaaccggaacccgtacattgggaacccaaagccgtacattgggaaccggtcacacatgtaagtgactgatataaaagagaaaaaaggcgatttttccgcctaaaactctttaaaacttattaaaactcttaaaacccgcctggcctgtgcataactgtctggccagcgcacagccgaagagctgcaaaaagcgcctacccttcggtcgctgcgctccctacgccccgccgcttcgcgtcggcctatcgcggccgctggccgctcaaaaatggctggcctacggccaggcaatctaccagggcgcggacaagccgcgccgtcgccactcgaccgccggcgcccacatcaaggcaccctgcctcgcgcgtttcggtgatgacggtgaaaacctctgacacatgcagctcccggagacggtcacagcttgtctgtaagcggatgccgggagcagacaagcccgtcagggcgcgtcagcgggtgttggcgggtgtcggggcgcagccatgacccagtcacgtagcgatagcggagtgtatactggcttaactatgcggcatcagagcagattgtactgagagtgcaccatatgcggtgtgaaataccgcacagatgcgtaaggagaaaataccgcatcaggcgctcttccgcttcctcgctcactgactcgctgcgctcggtcgttcggctgcggcgagcggtatcagctcactcaaaggcggtaatacggttatccacagaatcaggggataacgcaggaaagaacatgtgagcaaaaggccagcaaaaggccaggaaccgtaaaaaggccgcgttgctggcgtttttccataggctccgcccccctgacgagcatcacaaaaatcgacgctcaagtcagaggtggcgaaacccgacaggactataaagataccaggcgtttccccctggaagctccctcgtgcgctctcctgttccgaccctgccgcttaccggatacctgtccgcctttctcccttcgggaagcgtggcgctttctcatagctcacgctgtaggtatctcagttcggtgtaggtcgttcgctccaagctgggctgtgtgcacgaaccccccgttcagcccgaccgctgcgccttatccggtaactatcgtcttgagtccaacccggtaagacacgacttatcgccactggcagcagccactggtaacaggattagcagagcgaggtatgtaggcggtgctacagagttcttgaagtggtggcctaactacggctacactagaaggacagtatttggtatctgcgctctgctgaagccagttaccttcggaaaaagagttggtagctcttgatccggcaaacaaaccaccgctggtagcggtggtttttttgtttgcaagcagcagattacgcgcagaaaaaaaggatctcaagaagatcctttgatcttttctacggggtctgacgctcagtggaacgaaaactcacgttaagggattttggtcatgcattctaggtactaaaacaattcatccagtaaaatataatattttattttctcccaatcaggcttgatccccagtaagtcaaaaaatagctcgacatactgttcttccccgatatcctccctgatcgaccggacgcagaaggcaatgtcataccacttgtccgccctgccgcttctcccaagatcaataaagccacttactttgccatctttcacaaagatgttgctgtctcccaggtcgccgtgggaaaagacaagttcctcttcgggcttttccgtctttaaaaaatcatacagctcgcgcggatctttaaatggagtgtcttcttcccagttttcgcaatccacatcggccagatcgttattcagtaagtaatccaattcggctaagcggctgtctaagctattcgtatagggacaatccgatatgtcgatggagtgaaagagcctgatgcactccgcatacagctcgataatcttttcagggctttgttcatcttcatactcttccgagcaaaggacgccatcggcctcactcatgagcagattgctccagccatcatgccgttcaaagtgcaggacctttggaacaggcagctttccttccagccatagcatcatgtccttttcccgttccacatcataggtggtccctttataccggctgtccgtcatttttaaatataggttttcattttctcccaccagcttatataccttagcaggagacattccttccgtatcttttacgcagcggtatttttcgatcagttttttcaattccggtgatattctcattttagccatttattatttccttcctcttttctacagtatttaaagataccccaagaagctaattataacaagacgaactccaattcactgttccttgcattctaaaaccttaaataccagaaaacagctttttcaaagttgttttcaaagttggcgtataacatagtatcgacggagccgattttgaaaccgcggtgatcacaggcagcaacgctctgtcatcgttacaatcaacatgctaccctccgcgagatcatccgtgtttcaaacccggcagcttagttgccgttcttccgaatagcatcggtaacatgagcaaagtctgccgccttacaacggctctcccgctgacgccgtcccggactgatgggctgcctgtatcgagtggtgattttgtgccgagctgccggtcggggagctgttggctggctggtggcaggatatattgtggtgtaaacaaattgacgcttagacaacttaataacacattgcggacgtttttaatgtactgaattaacgccgaattaa

SEQ ID NO: 53 - protein, 62 aa, Artificial sequence; identical to SEQ ID NO: 43
  Synthetic Construct

SEQ ID NO: 54 - DNA, 8678 bp, Artificial sequence
  plasmid VC-MME465-1qcz
  transit_peptide (1666)..(1755)
  CDS (1666)..(1755)
  CDS (1756)..(1764): adapter
gctttgggcggatcctctagaggacaatcagtaaattgaacggagaatattattcataaaaatacgatagtaacgggtgatatattcattagaatgaaccgaaaccggcggtaaggatctgagctacacatgctcaggttttttacaacgtgcacaacagaattgaaagcaaatatcatgcgatcataggcgtctcgcatatctcattaaagcagggcatgccggtcgagtcaaatctcggtgacgggcaggaccggacggggcggtaccggcaggctgaagtccagctgccagaaacccacgtcatgccagttcccgtgcttgaagccggccgcccgcagcatgccgcggggggcatatccgagcgcctcgtgcatgcgcacgctcgggtcgttgggcagcccgatgacagcgaccacgctcttgaagccctgtgcctccagggacttcagcaggtgggtgtagagcgtggagcccagtcccgtccgctggtggcggggggagacgtacacggtcgactcggccgtccagtcgtaggcgttgcgtgccttccaggggcccgcgtaggcgatgccggcgacctcgccgtccacctcggcgacgagccagggatagcgctcccgcagacggacgaggtcgtccgtccactcctgcggttcctgcggctcggtacggaagttgaccgtgcttgtctcgatgtagtggttgacgatggtgcagaccgccggcatgtccgcctcggtggcacggcggatgtcggccgggcgtcgttctgggctcatggtagactcgacggatccacgtgtggaagatatgaatttttttgagaaactagataagattaatgaatatcggtgttttggttttttcttgtggccgtctttgtttatattgagatttttcaaatcagtgcgcaagacgtgacgtaagtatccgagtcagtttttatttttctactaatttggtcgaatctagactgcagcaaatttacacattgccactaaacgtctaaacccttgtaatttgtttttgttttactatgtgtgttatgtatttgatttgcgataaatttttatatttggtactaaatttataacaccttttatgctaacgtttgccaacacttagcaatttgcaagttgattaattgattctaaattatttttgtcttctaaatacatatactaatcaactggaaatgtaaatatttgctaatatttctactataggagaattaaagtgagtgaatatggtaccacaaggtttggagatttaattgttgcaatgctgcatggatggcatatacaccaaacattcaataattcttgaggataataatggtaccacacaagatttgaggtgcatgaacgtcacgtggacaaaaggtttagtaatttttcaagacaacaatgttaccacacacaagttttgaggtgcatgcatggatgccctgtggaaagtttaaaaatattttggaaatgatttgcatggaagccatgtgtaaaaccatgacatccacttggaggatgcaataatgaagaaaactacaaatttacatgcaactagttatgcatgtagtctatataatgaggattttgcaatactttcattcatacacactcactaagttttacacgattataatttcttcatagccacccaaacatgcagaggtttttctccgccagatcgattctcggttacgccgtcaagacgcggaggaggtctttctcttctcgttcttcgtctctcctttgctcttccatggcaatgattaattaacgaagagcaagagctcgaatttccccgatcgttcaaacatttggcaataaagtttcttaagattgaatcctgttgccggtcttgcgatgattatcatataatttctgttgaattacgttaagcatgtaataattaacatgtaatgcatgacgttatttatgagatgggtttttatgattagagtcccgcaattatacatttaatacgcgatagaaaacaaaatatagcgcgcaaactaggataaattatcgcgcgcggtgtcatctatgttactagatcgggaattggcatgcaagcttggcactggccgtcgttttacaacgtcgtgactgggaaaaccctggcgttacccaacttaatcgccttgcagcacatccccctttcgccagctggcgtaatagcgaagaggcccgcaccgatcgcccttcccaacagttgcgcagcctgaatggcgaatgctagagcagcttgagcttggatcagattgtcgtttcccgccttcagtttaaactatcagtgtttgacaggatatattggcgggtaaacctaagagaaaagagcgtttattagaataatcggatatttaaaagggcgtgaaaaggtttatccgttcgtccatttgtatgtgcatgccaaccacagggttcccctcgggatcaaagtactttgatccaacccctccgctgctatagtgcagtcggcttctgacgttcagtgcagccgtcttctgaaaacgacatgtcgcacaagtcctaagttacgcgacaggctgccgccctgcccttttcctggcgttttcttgtcgcgtgttttagtcgcataaagtagaatacttgcgactagaaccggagacattacgccatgaacaagagcgccgccgctggcctgctgggctatgcccgcgtcagcaccgacgaccaggacttgaccaaccaacgggccgaactgcacgcggccggctgcaccaagctgttttccgagaagatcaccggcaccaggcgcgaccgcccggagctggccaggatgcttgaccacctacgccctggcgacgttgtgacagtgaccaggctagaccgcctggcccgcagcacccgcgacctactggacattgccgagcgcatccaggaggccggcgcgggcctgcgtagcctggcagagccgtgggccgacaccaccacgccggccggccgcatggtgttgaccgtgttcgccggcattgccgagttcgagcgttccctaatcatcgaccgcacccggagcgggcgcgaggccgccaaggcccgaggcgtgaagtttggcccccgccctaccctcaccccggcacagatcgcgcacgcccgcgagctgatcgaccaggaaggccgcaccgtgaaagaggcggctgcactgcttggcgtgcatcgctcgaccctgtaccgcgcacttgagcgcagcgaggaagtgacgcccaccgaggccaggcggcgcggtgccttccgtgaggacgcattgaccgaggccgacgccctggcggccgccgagaatgaacgccaagaggaacaagcatgaaaccgcaccaggacggccaggacgaaccgtttttcattaccgaagagatcgaggcggagatgatcgcggccgggtacgtgttcgagccgcccgcgcacgtctcaaccgtgcggctgcatgaaatcctggccggtttgtctgatgccaagctggcggcctggccggccagcttggccgctgaagaaaccgagcgccgccgtctaaaaaggtgatgtgtatttgagtaaaacagcttgcgtcatgcggtcgctgcgtatatgatgcgatgagtaaataaacaaatacgcaaggggaacgcatgaaggttatcgctgtacttaaccagaaaggcgggtcaggcaagacgaccatcgcaacccatctagcccgcgccctgcaactcgccggggccgatgttctgttagtcgattccgatccccagggcagtgcccgcgattgggcggccgtgcgggaagatcaaccgctaaccgttgtcggcatcgaccgcccgacgattgaccgcgacgtgaaggccatcggccggcgcgacttcgtagtgatcgacggagcgccccaggcggcggacttggctgtgtccgcgatcaaggcagccgacttcgtgctgattccggtgcagccaagcccttacgacatatgggccaccgccgacctggtggagctggttaagcagcgcattgaggtcacggatggaaggctacaagcggcctttgtcgtgtcgcgggcgatcaaaggcacgcgcatcggcggtgaggttgccgaggcgctggccgggtacgagctgcccattcttgagtcccgtatcacgcagcgcgtgagctacccaggcactgccgccgccggcacaaccgttcttgaatcagaacccgagggcgacgctgcccgcgaggtccaggcgctggccgctgaaattaaatcaaaactcatttgagttaatgaggtaaagagaaaatgagcaaaagcacaaacacgctaagtgccggccgtccgagcgcacgcagcagcaaggctgcaacgttggccagcctggcagacacgccagccatgaagcgggtcaactttcagttgccggcggaggatcacaccaagctgaagatgtacgcggtacgccaaggcaagaccattaccgagctgctatctgaatacatcgcgcagctaccagagtaaatgagcaaatgaataaatgagtagatgaattttagcggctaaaggaggcggcatggaaaatcaagaacaaccaggcaccgacgccgtggaatgccccatgtgtggaggaacgggcggttggccaggcgtaagcggctgggttgcctgccggccctgcaatggcactggaacccccaagcccgaggaatcggcgtgagcggtcgcaaaccatccggcccggtacaaatcggcgcggcgctgggtgatgacctggtggagaagttgaaggccgcgcaggccgcccagcggcaacgcatcgaggcagaagcacgccccggtgaatcgtggcaagcggccgctgatcgaatccgcaaagaatcccggcaaccgccggcagccggtgcgccgtcgattaggaagccgcccaagggcgacgagcaaccagattttttcgttccgatgctctatgacgtgggcacccgcgatagtcgcagcatcatggacgtggccgttttccgtctgtcgaagcgtgaccgacgagctggcgaggtgatccgctacgagcttccagacgggcacgtagaggtttccgcagggccggccggcatggccagtgtgtgggattacgacctggtactgatggcggtttcccatctaaccgaatccatgaaccgataccgggaagggaagggagacaagcccggccgcgtgttccgtccacacgttgcggacgtactcaagttctgccggcgagccgatggcggaaagcagaaagacgacctggtagaaacctgcattcggttaaacaccacgcacgttgccatgcagcgtacgaagaaggccaagaacggccgcctggtgacggtatccgagggtgaagccttgattagccgctacaagatcgtaaagagcgaaaccgggcggccggagtacatcgagatcgagctagctgattggatgtaccgcgagatcacagaaggcaagaacccggacgtgctgacggttcaccccgattactttttgatcgatcccggcatcggccgttttctctaccgcctggcacgccgcgccgcaggcaaggcagaagccagatggttgttcaagacgatctacgaacgcagtggcagcgccggagagttcaagaagttctgtttcaccgtgcgcaagctgatcgggtcaaatgacctgccggagtacgatttgaaggaggaggcggggcaggctggcccgatcctagtcatgcgctaccgcaacctgatcgagggcgaagcatccgccggttcctaatgtacggagcagatgctagggcaaattgccctagcaggggaaaaaggtcgaaaaggtctctttcctgtggatagcacgtacattgggaacccaaagccgtacattgggaaccggaacccgtacattgggaacccaaagccgtacattgggaaccggtcacacatgtaagtgactgatataaaagagaaaaaaggcgatttttccgcctaaaactctttaaaacttattaaaactcttaaaacccgcctggcctgtgcataactgtctggccagcgcacagccgaagagctgcaaaaagcgcctacccttcggtcgctgcgctccctacgccccgccgcttcgcgtcggcctatcgcggccgctggccgctcaaaaatggctggcctacggccaggcaatctaccagggcgcggacaagccgcgccgtcgccactcgaccgccggcgcccacatcaaggcaccctgcctcgcgcgtttcggtgatgacggtgaaaacctctgacacatgcagctcccggagacggtcacagcttgtctgtaagcggatgccgggagcagacaagcccgtcagggcgcgtcagcgggtgttggcgggtgtcggggcgcagccatgacccagtcacgtagcgatagcggagtgtatactggcttaactatgcggcatcagagcagattgtactgagagtgcaccatatgcggtgtgaaataccgcacagatgcgtaaggagaaaataccgcatcaggcgctcttccgcttcctcgctcactgactcgctgcgctcggtcgttcggctgcggcgagcggtatcagctcactcaaaggcggtaatacggttatccacagaatcaggggataacgcaggaaagaacatgtgagcaaaaggccagcaaaaggccaggaaccgtaaaaaggccgcgttgctggcgtttttccataggctccgcccccctgacgagcatcacaaaaatcgacgctcaagtcagaggtggcgaaacccgacaggactataaagataccaggcgtttccccctggaagctccctcgtgcgctctcctgttccgaccctgccgcttaccggatacctgtccgcctttctcccttcgggaagcgtggcgctttctcatagctcacgctgtaggtatctcagttcggtgtaggtcgttcgctccaagctgggctgtgtgcacgaaccccccgttcagcccgaccgctgcgccttatccggtaactatcgtcttgagtccaacccggtaagacacgacttatcgccactggcagcagccactggtaacaggattagcagagcgaggtatgtaggcggtgctacagagttcttgaagtggtggcctaactacggctacactagaaggacagtatttggtatctgcgctctgctgaagccagttaccttcggaaaaagagttggtagctcttgatccggcaaacaaaccaccgctggtagcggtggtttttttgtttgcaagcagcagattacgcgcagaaaaaaaggatctcaagaagatcctttgatcttttctacggggtctgacgctcagtggaacgaaaactcacgttaagggattttggtcatgcattctaggtactaaaacaattcatccagtaaaatataatattttattttctcccaatcaggcttgatccccagtaagtcaaaaaatagctcgacatactgttcttccccgatatcctccctgatcgaccggacgcagaaggcaatgtcataccacttgtccgccctgccgcttctcccaagatcaataaagccacttactttgccatctttcacaaagatgttgctgtctcccaggtcgccgtgggaaaagacaagttcctcttcgggcttttccgtctttaaaaaatcatacagctcgcgcggatctttaaatggagtgtcttcttcccagttttcgcaatccacatcggccagatcgttattcagtaagtaatccaattcggctaagcggctgtctaagctattcgtatagggacaatccgatatgtcgatggagtgaaagagcctgatgcactccgcatacagctcgataatcttttcagggctttgttcatcttcatactcttccgagcaaaggacgccatcggcctcactcatgagcagattgctccagccatcatgccgttcaaagtgcaggacctttggaacaggcagctttccttccagccatagcatcatgtccttttcccgttccacatcataggtggtccctttataccggctgtccgtcatttttaaatataggttttcattttctcccaccagcttatataccttagcaggagacattccttccgtatcttttacgcagcggtatttttcgatcagttttttcaattccggtgatattctcattttagccatttattatttccttcctcttttctacagtatttaaagataccccaagaagctaattataacaagacgaactccaattcactgttccttgcattctaaaaccttaaataccagaaaacagctttttcaaagttgttttcaaagttggcgtataacatagtatcgacggagccgattttgaaaccgcggtgatcacaggcagcaacgctctgtcatcgttacaatcaacatgctaccctccgcgagatcatccgtgtttcaaacccggcagcttagttgccgttcttccgaatagcatcggtaacatgagcaaagtctgccgccttacaacggctctcccgctgacgccgtcccggactgatgggctgcctgtatcgagtggtgattttgtgccgagctgccggtcggggagctgttggctggctggtggcaggatatattgtggtgtaaacaaattgacgcttagacaacttaataacacattgcggacgtttttaatgtactgaattaacgccgaattaa

SEQ ID NO: 55 - protein, 33 aa, Artificial sequence; identical to SEQ ID NO: 45
  Synthetic Construct

SEQ ID NO: 56 - DNA, 9043 bp, Artificial sequence
  plasmid VC-MME489-1QCZ
agctttgggcggatcctctagaggacaatcagtaaattgaacggagaatattattcataaaaatacgatagtaacgggtgatatattcattagaatgaaccgaaaccggcggtaaggatctgagctacacatgctcaggttttttacaacgtgcacaacagaattgaaagcaaatatcatgcgatcataggcgtctcgcatatctcattaaagcagggcatgccggtcgagtcaaatctcggtgacgggcaggaccggacggggcggtaccggcaggctgaagtccagctgccagaaacccacgtcatgccagttcccgtgcttgaagccggccgcccgcagcatgccgcggggggcatatccgagcgcctcgtgcatgcgcacgctcgggtcgttgggcagcccgatgacagcgaccacgctcttgaagccctgtgcctccagggacttcagcaggtgggtgtagagcgtggagcccagtcccgtccgctggtggcggggggagacgtacacggtcgactcggccgtccagtcgtaggcgttgcgtgccttccaggggcccgcgtaggcgatgccggcgacctcgccgtccacctcggcgacgagccagggatagcgctcccgcagacggacgaggtcgtccgtccactcctgcggttcctgcggctcggtacggaagttgaccgtgcttgtctcgatgtagtggttgacgatggtgcagaccgccggcatgtccgcctcggtggcacggcggatgtcggccgggcgtcgttctgggctcatggtagactcgacggatccacgtgtggaagatatgaatttttttgagaaactagataagattaatgaatatcggtgttttggttttttcttgtggccgtctttgtttatattgagatttttcaaatcagtgcgcaagacgtgacgtaagtatccgagtcagtttttatttttctactaatttggtcgaatctagattcgacggtatcgataagctcgcggatccctgaaagcgacgttggatgttaacatctacaaattgccttttcttatcgaccatgtacgtaagcgcttacgtttttggtggacccttgaggaaactggtagctgttgtgggcctgtggtctcaagatggatcattaatttccaccttcacctacgatggggggcatcgcaccggtgagtaatattgtacggctaagagcgaatttggcctgtaggatccctgaaagcgacgttggatgttaacatctacaaattgccttttcttatcgaccatgtacgtaagcgcttacgtttttggtggacccttgaggaaactggtagctgttgtgggcctgtggtctcaagatggatcattaatttccaccttcacctacgatggggggcatcgcaccggtgagtaatattgtacggctaagagcgaatttggcctgtaggatccctgaaagcgacgttggatgttaacatctacaaattgccttttcttatcgaccatgtacgtaagcgcttacgtttttggtggacccttgaggaaactggtagctgttgtgggcctgtggtctcaagatggatcattaatttccaccttcacctacgatggggggcatcgcaccggtgagtaatattgtacggctaagagcgaatttggcctgtaggatccgcgagctggtcaatcccattgcttttgaagcagctcaacattgatctctttctcgatcgagggagatttttcaaatcagtgcgcaagacgtgacgtaagtatccgagtcagtttttatttttctactaatttggtcgtttatttcggcgtgtaggacatggcaaccgggcctgaatttcgcgggtattctgtttctattccaactttttcttgatccgcagccattaacgacttttgaatagatacgctgacacgccaagcctcgctagtcaaaagtgtaccaaacaacgctttacagcaagaacggaatgcgcgtgacgctcgcggtgacgccatttcgccttttcagaaatggataaatagccttgcttcctattatatcttcccaaattaccaatacattacactagcatctgaatttcataaccaatctcgatacaccaaatcgaagatctccctggaattccagctgaccaccatggcaattcccggggatcagctcgaatttccccgatcgttcaaacatttggcaataaagtttcttaagattgaatcctgttgccggtcttgcgatgattatcatataatttctgttgaattacgttaagcatgtaataattaacatgtaatgcatgacgttatttatgagatgggtttttatgattagagtcccgcaattatacatttaatacgcgatagaaaacaaaatatagcgcgcaaactaggataaattatcgcgcgcggtgtcatctatgttactagatcgggaattggcatgcaagcttggcactggccgtcgttttacaacgtcgtgactgggaaaaccctggcgttacccaacttaatcgccttgcagcacatccccctttcgccagctggcgtaatagcgaagaggcccgcaccgatcgcccttcccaacagttgcgcagcctgaatggcgaatgctagagcagcttgagcttggatcagattgtcgtttcccgccttcagtttaaactatcagtgtttgacaggatatattggcgggtaaacctaagagaaaagagcgtttattagaataatcggatatttaaaagggcgtgaaaaggtttatccgttcgtccatttgtatgtgcatgccaaccacagggttcccctcgggatcaaagtactttgatccaacccctccgctgctatagtgcagtcggcttctgacgttcagtgcagccgtcttctgaaaacgacatgtcgcacaagtcctaagttacgcgacaggctgccgccctgcccttttcctggcgttttcttgtcgcgtgttttagtcgcataaagtagaatacttgcgactagaaccggagacattacgccatgaacaagagcgccgccgctggcctgctgggctatgcccgcgtcagcaccgacgaccaggacttgaccaaccaacgggccgaactgcacgcggccggctgcaccaagctgttttccgagaagatcaccggcaccaggcgcgaccgcccggagctggccaggatgcttgaccacctacgccctggcgacgttgtgacagtgaccaggctagaccgcctggcccgcagcacccgcgacctactggacattgccgagcgcatccaggaggccggcgcgggcctgcgtagcctggcagagccgtgggccgacaccaccacgccggccggccgcatggtgttgaccgtgttcgccggcattgccgagttcgagcgttccctaatcatcgaccgcacccggagcgggcgcgaggccgccaaggcccgaggcgtgaagtttggcccccgccctaccctcaccccggcacagatcgcgcacgcccgcgagctgatcgaccaggaaggccgcaccgtgaaagaggcggctgcactgcttggcgtgcatcgctcgaccctgtaccgcgcacttgagcgcagcgaggaagtgacgcccaccgaggccaggcggcgcggtgccttccgtgaggacgcattgaccgaggccgacgccctggcggccgccgagaatgaacgccaagaggaacaagcatgaaaccgcaccaggacggccaggacgaaccgtttttcattaccgaagagatcgaggcggagatgatcgcggccgggtacgtgttcgagccgcccgcgcacgtctcaaccgtgcggctgcatgaaatcctggccggtttgtctgatgccaagctggcggcctggccggccagcttggccgctgaagaaaccgagcgccgccgtctaaaaaggtgatgtgtatttgagtaaaacagcttgcgtcatgcggtcgctgcgtatatgatgcgatgagtaaataaacaaatacgcaaggggaacgcatgaaggttatcgctgtacttaaccagaaaggcgggtcaggcaagacgaccatcgcaacccatctagcccgcgccctgcaactcgccggggccgatgttctgttagtcgattccgatccccagggcagtgcccgcgattgggcggccgtgcgggaagatcaaccgctaaccgttgtcggcatcgaccgcccgacgattgaccgcgacgtgaaggccatcggccggcgcgacttcgtagtgatcgacggagcgccccaggcggcggacttggctgtgtccgcgatcaaggcagccgacttcgtgctgattccggtgcagccaagcccttacgacatatgggccaccgccgacctggtggagctggttaagcagcgcattgaggtcacggatggaaggctacaagcggcctttgtcgtgtcgcgggcgatcaaaggcacgcgcatcggcggtgaggttgccgaggcgctggccgggtacgagctgcccattcttgagtcccgtatcacgcagcgcgtgagctacccaggcactgccgccgccggcacaaccgttcttgaatcagaacccgagggcgacgctgcccgcgaggtccaggcgctggccgctgaaattaaatcaaaactcatttgagttaatgaggtaaagagaaaatgagcaaaagcacaaacacgctaagtgccggccgtccgagcgcacgcagcagcaaggctgcaacgttggccagcctggcagacacgccagccatgaagcgggtcaactttcagttgccggcggaggatcacaccaagctgaagatgtacgcggtacgccaaggcaagaccattaccgagctgctatctgaatacatcgcgcagctaccagagtaaatgagcaaatgaataaatgagtagatgaattttagcggctaaaggaggcggcatggaaaatcaagaacaaccaggcaccgacgccgtggaatgccccatgtgtggaggaacgggcggttggccaggcgtaagcggctgggttgtctgccggccctgcaatggcactggaacccccaagcccgaggaatcggcgtgacggtcgcaaaccatccggcccggtacaaatcggcgcggcgctgggtgatgacctggtggagaagttgaaggccgcgcaggccgcccagcggcaacgcatcgaggcagaagcacgccccggtgaatcgtggcaagcggccgctgatcgaatccgcaaagaatcccggcaaccgccggcagccggtgcgccgtcgattaggaagccgcccaagggcgacgagcaaccagattttttcgttccgatgctctatgacgtgggcacccgcgatagtcgcagcatcatggacgtggccgttttccgtctgtcgaagcgtgaccgacgagctggcgaggtgatccgctacgagcttccagacgggcacgtagaggtttccgcagggccggccggcatggccagtgtgtgggattacgacctggtactgatggcggtttcccatctaaccgaatccatgaaccgataccgggaagggaagggagacaagcccggccgcgtgttccgtccacacgttgcggacgtactcaagttctgccggcgagccgatggcggaaagcagaaagacgacctggtagaaacctgcattcggttaaacaccacgcacgttgccatgcagcgtacgaagaaggccaagaacggccgcctggtgacggtatccgagggtgaagccttgattagccgctacaagatcgtaaagagcgaaaccgggcggccggagtacatcgagatcgagctagctgattggatgtaccgcgagatcacagaaggcaagaacccggacgtgctgacggttcaccccgattactttttgatcgatcccggcatcggccgttttctctaccgcctggcacgccgcgccgcaggcaaggcagaagccagatggttgttcaagacgatctacgaacgcagtggcagcgccggagagttcaagaagttctgtttcaccgtgcgcaagctgatcgggtcaaatgacctgccggagtacgatttgaaggaggaggcggggcaggctggcccgatcctagtcatgcgctaccgcaacctgatcgagggcgaagcatccgccggttcctaatgtacggagcagatgctagggcaaattgccctagcaggggaaaaaggtcgaaaaggtctctttcctgtggatagcacgtacattgggaacccaaagccgtacattgggaaccggaacccgtacattgggaacccaaagccgtacattgggaaccggtcacacatgtaagtgactgatataaaagagaaaaaaggcgatttttccgcctaaaactctttaaaacttattaaaactcttaaaacccgcctggcctgtgcataactgtctggccagcgcacagccgaagagctgcaaaaagcgcctacccttcggtcgctgcgctccctacgccccgccgcttcgcgtcggcctatcgcggccgctggccgctcaaaaatggctggcctacggccaggcaatctaccagggcgcggacaagccgcgccgtcgccactcgaccgccggcgcccacatcaaggcaccctgcctcgcgcgtttcggtgatgacggtgaaaacctctgacacatgcagctcccggagacggtcacagcttgtctgtaagcggatgccgggagcagacaagcccgtcagggcgcgtcagcgggtgttggcgggtgtcggggcgcagccatgacccagtcacgtagcgatagcggagtgtatactggcttaactatgcggcatcagagcagattgtactgagagtgcaccatatgcggtgtgaaataccgcacagatgcgtaaggagaaaataccgcatcaggcgctcttccgcttcctcgctcactgactcgctgcgctcggtcgttcggctgcggcgagcggtatcagctcactcaaaggcggtaatacggttatccacagaatcaggggataacgcaggaaagaacatgtgagcaaaaggccagcaaaaggccaggaaccgtaaaaaggccgcgttgctggcgtttttccataggctccgcccccctgacgagcatcacaaaaatcgacgctcaagtcagaggtggcgaaacccgacaggactataaagataccaggcgtttccccctggaagctccctcgtgcgctctcctgttccgaccctgccgcttaccggatacctgtccgcctttctcccttcgggaagcgtggcgctttctcatagctcacgctgtaggtatctcagttcggtgtaggtcgttcgctccaagctgggctgtgtgcacgaaccccccgttcagcccgaccgctgcgccttatccggtaactatcgtcttgagtccaacccggtaagacacgacttatcgccactggcagcagccactggtaacaggattagcagagcgaggtatgtaggcggtgctacagagttcttgaagtggtggcctaactacggctacactagaaggacagtatttggtatctgcgctctgctgaagccagttaccttcggaaaaagagttggtagctcttgatccggcaaacaaaccaccgctggtagcggtggtttttttgtttgcaagcagcagattacgcgcagaaaaaaaggatctcaagaagatcctttgatcttttctacggggtctgacgctcagtggaacgaaaactcacgttaagggattttggtcatgcattctaggtactaaaacaattcatccagtaaaatataatattttattttctcccaatcaggcttgatccccagtaagtcaaaaaatagctcgacatactgttcttccccgatatcctccctgatcgaccggacgcagaaggcaatgtcataccacttgtccgccctgccgcttctcccaagatcaataaagccacttactttgccatctttcacaaagatgttgctgtctcccaggtcgccgtgggaaaagacaagttcctcttcgggcttttccgtctttaaaaaatcatacagctcgcgcggatctttaaatggagtgtcttcttcccagttttcgcaatccacatcggccagatcgttattcagtaagtaatccaattcggctaagcggctgtctaagctattcgtatagggacaatccgatatgtcgatggagtgaaagagcctgatgcactccgcatacagctcgataatcttttcagggctttgttcatcttcatactcttccgagcaaaggacgccatcggcctcactcatgagcagattgctccagccatcatgccgttcaaagtgcaggacctttggaacaggcagctttccttccagccatagcatcatgtccttttcccgttccacatcataggtggtccctttataccggctgtccgtcatttttaaatataggttttcattttctcccaccagcttatataccttagcaggagacattccttccgtatcttttacgcagcggtatttttcgatcagttttttcaattccggtgatattctcattttagccatttattatttccttcctcttttctacagtatttaaagataccccaagaagctaattataacaagacgaactccaattcactgttccttgcattctaaaaccttaaataccagaaaacagctttttcaaagttgttttcaaagttggcgtataacatagtatcgacggagccgattttgaaaccgcggtgatcacaggcagcaacgctctgtcatcgttacaatcaacatgctaccctccgcgagatcatccgtgtttcaaacccggcagcttagttgccgttcttccgaatagcatcggtaacatgagcaaagtctgccgccttacaacggctctcccgctgacgccgtcccggactgatgggctgcctgtatcgagtggtgattttgtgccgagctgccggtcggggagctgttggctggctggtggcaggatatattgtggtgtaaacaaattgacgcttagacaacttaataacacattgcggacgtttttaatgtactgaattaacgccgaatta

SEQ ID NO: 57 - DNA, 29 bp, Artificial sequence
  amplification of the targeting sequence of the gene IVD from Arabidopsis thaliana to generate targeting vectors
atagaattcatgcagaggtttttctccgc

SEQ ID NO: 58 - DNA, 29 bp, Artificial sequence
  amplification of the targeting sequence of the gene IVD from Arabidopsis thaliana to generate targeting vectors
atagaattccgaagaacgagaagagaaag

SEQ ID NO: 59 - DNA, 31 bp, Artificial sequence
  amplification of the targeting sequence of the gene IVD from Arabidopsis thaliana to generate targeting vectors
atagtttaaacatgcagaggtttttctccgc

SEQ ID NO: 60 - DNA, 36 bp, Artificial sequence
  amplification of the targeting sequence of the gene IVD from Arabidopsis thaliana to generate targeting vectors
ataccatggaagagcaaaggagagacgaagaacgag

SEQ ID NO: 61 - DNA, 81 bp, Arabidopsis thaliana
atgcagaggtttttctccgccagatcgattctcggttacgccgtcaagacgcggaggaggtctttctcttctcgttcttcg

SEQ ID NO: 62 - DNA, 89 bp, Arabidopsis thaliana
atgcagaggtttttctccgccagatcgattctcggttacgccgtcaagacgcggaggaggtctttctcttctcgttcttcgtctctcct

SEQ ID NO: 63 - DNA, 1473 bp, Escherichia coli
  CDS (1)..(1473): transl_table=11
atgtcccgaatggcagaacagcagctttatatacatggtggttatacctccgccaccagcggtcgcaccttcgagaccattaacccggccaacggtaacgtgctggcgaccgtgcaggccgccgggcgcgaggatgtcgatcgcgccgtgaaaagcgcccagcaggggcaaaaaatctgggcgtcgatgaccgccatggagcgctcgcgtattctgcgtcgggccgttgatattctgcgtgaacgcaatgacgaactcgcaaaactggaaaccctcgacaccggaaaagcatattcggaaacctcaaccgtcgatatcgttaccggtgcggacgtgctggagtactacgccgggctgatcccggcgctggaaggcagccagatcccgttgcgtgaaacgtcctttgtgtatacccgccgcgaaccgctgggcgtagtggcagggattggcgcatggaactacccgatccagattgccctgtggaaatccgccccggcgctggcggcaggcaacgcaatgattttcaaaccgagcgaagttaccccgcttaccgcgttaaagctggctgaaatttacagcgaagcgggcctgccggacggcgtatttaacgtgttgccgggcgtgggcgcggagaccgggcaatatctgaccgagcatccgggcattgccaaagtgtcatttaccggcggtgtcgccagcggcaaaaaagtgatggctaactcggcggcctcttccctgaaagaagtgaccatggaactgggcggtaaatcaccgctgatcgttttcgatgatgcggatctcgatctcgccgccgatatcgccatgatggcaaacttcttcagctccggtcaggtgtgtaccaatggcacccgcgtcttcgttccggcgaaatgcaaagccgcatttgagcagaaaattctggcgcgcgttgagcgcattcgcgcgggcgacgttttcgatccgcaaactaacttcggcccgctggtcagcttcccgcatcgcgataacgtgctgcgctatatcgccaaaggcaaagaggaaggcgcgcgcgtactgtgcggcggcgatgtactgaaaggcgatggcttcgataacggcgcatgggttgcaccgacagtgttcaccgattgcagcgacgatatgaccatcgtgcgtgaagagatcttcgggccagtgatgtccattctgacctacgagtcggaagacgaagtcattcgccgcgctaacgataccgactacggcctggcggcgggcatcgtgacagcggacctgaaccgcgcgcatcgcgtcattcatcagctggaagcgggtatttgctggatcaacacctggggcgaatccccggcagagatgcccgttggcggctacaaacactccggcattggtcgcgagaacggcgtgatgacgctccagagttacacccaggtgaagtccatccaggttgagatggctaaattccagtccatattctaa

SEQ ID NO: 64 - protein, 490 aa, Escherichia coli
MSRMAEQQLYIHGGYTSATSGRTFETINPANGNVLATVQAAGREDVDRAVKSAQQGQKIWASMTAMERSRILRRAVDILRERNDELAKLETLDTGKAYSETSTVDIVTGADVLEYYAGLIPALEGSQIPLRETSFVYTRREPLGVVAGIGAWNYPIQIALWKSAPALAAGNAMIFKPSEVTPLTALKLAEIYSEAGLPDGVFNVLPGVGAETGQYLTEHPGIAKVSFTGGVASGKKVMANSAASSLKEVTMELGGKSPLIVFDDADLDLAADIAMMANFFSSGQVCTNGTRVFVPAKCKAAFEQKILARVERIRAGDVFDPQTNFGPLVSFPHRDNVLRYIAKGKEEGARVLCGGDVLKGDGFDNGAWVAPTVFTDCSDDMTIVREEIFGPVMSILTYESEDEVIRRANDTDYGLAAGIVTADLNRAHRVIHQLEAGICWINTWGESPAEMPVGGYKHSGIGRENGVMTLQSYTQVKSIQVEMAKFQSIF

SEQ ID NO: 65 - DNA, 1721 bp, Cryptococcus neoformans var. neoformans B-3501A
  CDS (76)..(1596)
cacatccccatctcctccctaaccatatctgtctgtgctatttatcacatccccgcacgcaagttaattatcaagatggctcccacattcacacatgaattcaaccacgccggctacaagggcaaggtcgaggtccctaccggtatctttatcaacggcgaatgggcctcttccgtcgacaagaatgccaagaccattgacgtctacaaccccactacaggcgaggtccttaccaaaattcccgaggctttggaggccgacgttaacaaggccgtcgaggtcgcccacaatgctttcaacaactcttggggtctcagcgtccccggtttcaagcgaggagagtacctcattaagattgccgagttgatggagagggaccttgatatccttgcttctcttgaagctctcgacaacggcaaaactttcggcgctgctaagggcttcgacgttatcgaatctgccagaacatttaggtactacggtggatgggcggacaagatccacggcaaggttattgagacctcttcttctaagctcacatacaccctccatgaacctgtcggtgtctgcggtcaaattatcccctggaacttccctcttctcatgttctcatggaagatcgctcccgctcttgctgctggtaacactgtcgttatcaagccttcagagcttactcctttgaccgccatgtacatgactaagctcttcaatgaggctggtctccccaaaggtgtcattaacgttgtcgttggttacggccagaccgtcggtaatgcccttgctggtcaccctgccattgacaaggtcgctttcactggttccaccgccgtcggccgaaaggttatggaggaggcttccaagtccaacatcaagaaggtgacccttgagctcggtggaaagagcgccaacatcgtcttcgaggacgccgacttcgaggaagctgtcaaatattccgctcagggtatctttttcaaccacggtcagacctgttgtgccggttctcgaatctacgtccagaagcctatctatgaaaagttcgtcaaggccttcaaggagcaaacctccaagctcaaggtcggagaccccttcgaccctaacacctatcagggtcctcaggtttctcagattcaggctgagcgaatcatgagctatgtcgaccacggcaaacaggaaggtgctactgtcatcactggtggcaagcgatgcggtgacaagggttacttcattgagcctactgttttcggcgacgtcaccgccaacatgaaaatcgtgaaggaggagatctttggccccgtcgtcgttgtttctccgtttgagaccgaggaggaggctcttgaacatgccaacgactctgtctacggtcttgcttccgctgtcttcacttccaacatctctcgagctacccgagtcgccagtaagctcaaggctggtaccgtttggatcaactgttacaacgagcttcatcctcaagtgcccttcggtggtttcaaacagtctggtctcggtcgagagttgggagagtacgctctcgagaactacaccgaaatcaaggctgtccaaatcaacgtcggtgccaagtgcgctatccctacttaagcgttgatttaaatcaaacaaaaaaggcggcagaagtggattctgaagtacttggtgtaaaagatcttttcgggttttaaaacttttgtatatattagtactggtccatgcagcagtatttgtca

SEQ ID NO: 66 - protein, 506 aa, Cryptococcus neoformans var. neoformans B-3501A
MAPTFTHEFNHAGYKGKVEVPTGIFINGEWASSVDKNAKTIDVYNPTTGEVLTKIPEALEADVNKAVEVAHNAFNNSWGLSVPGFKRGEYLIKIAELMERDLDILASLEALDNGKTFGAAKGFDVIESARTFRYYGGWADKIHGKVIETSSSKLTYTLHEPVGVCGQIIPWNFPLLMFSWKIAPALAAGNTVVIKPSELTPLTAMYMTKLFNEAGLPKGVINVVVGYGQTVGNALAGHPAIDKVAFTGSTAVGRKVMEEASKSNIKKVTLELGGKSANIVFEDADFEEAVKYSAQGIFFNHGQTCCAGSRIYVQKPIYEKFVKAFKEQTSKLKVGDPFDPNTYQGPQVSQIQAERIMSYVDHGKQEGATVITGGKRCGDKGYFIEPTVFGDVTANMKIVKEEIFGPVVVVSPFETEEEALEHANDSVYGLASAVFTSNISRATRVASKLKAGTVWINCYNELHPQVPFGGFKQSGLGRELGEYALENYTEIKAVQINVGAKCAIPT

SEQ ID NO: 67 - DNA, 1635 bp, Cryptococcus neoformans var. neoformans B-3501A
  CDS (101)..(1588)
tgattaatcaagatgttaaaacaaactatattccctttccagattcattctatccttcaaagatttttggacgcaactcgtcacattttaatcatccataatgagtgccactgtcgccgaagttacattcaatacaggtttgtacatcaacggactatggaagaacggccggggagagcctcttctgtctgtgaatccggctactgaagaagtcatagcagaagttcaaaccgccagcaaagaagatgtcgatgaggccgtgaaagccgcaaggcactgctttgaaactgcttggggtactgaagtatcgtctcaattacgcggccagctgcttttcaagctagccgatggtatggaggcggcaatggaagagctggctaaactggagtaccttgactctggcaagcctctcgcttggtgtaaagcagatattgaagactcagtagcctgtttgaggtactatgctggttccgccgacaagatacaaggatcaatgattgagcttgacgacaagcataagcatgccttggctcgcaaggagcccatcggtgtttgcgctcagattgtaccttggaactatcctcttttaatgatgatttggaaaattgcccctgccctggctgctggttgcaccattgttttcaagcccgctgagcaaacacctctctcgactctcaagtttgccgagctgtttgagcttgcaggatacccagctggagttttcaacttggtcaacggcctcggtcgaaccactggagatgctctctccaggcacatggatgttgataaaatcgccttcaccggctccacaatcactgggcgacgcattgccattgctgcagctgagtctaatctgaaatcggtcacactcgagcttggcgggaaatccgcaaatatcgtttttgacgacgcgaacctacaggaagcagcgaaatgggcagcctttggcgtatacgagaatatgggtcaatcatgtagtgccgggtcaagggtgcttgtgcaagagtcaatctacgatcagttcatcacacatttcaaagctgctgcggaggccttcaaggtcggcgatccggcagatccggatacttttcaaggaccgcaagtcaatgaggcgcaattcaggaaggtcctcgattatattgagagtggcaagcgaagcggggcaaaacttttgaccggcggcagtagacatggatccagagggtactttatccaaccaacagtgttcggagacgtcactatggatatgaagatagcgagagaagaaatatttggccctgtggcttctgtcattcgtttcaaggacgaggctgacgctatatcgattgccaataacaccgaatatggtctggccgccgccgttcattctcagaactacgctcgagttcagcgagttacacgcaagttgaaggcaggtaccgtatggatcaatcaatacgtagcactctctcatcaggttccttttggtggatataagcagtctggatggggccgagagttgggattggagggtctcgagccttaccttatcacaaagtcagttcaccattactatggcggagatttcgagtggcccatcaagatatagagtcgctagctatcggtttatgatcatgttatgcattccagaatgcg

SEQ ID NO: 68 - protein, 495 aa, Cryptococcus neoformans var. neoformans B-3501A
MSATVAEVTFNTGLYINGLWKNGRGEPLLSVNPATEEVIAEVQTASKEDVDEAVKAARHCFETAWGTEVSSQLRGQLLFKLADGMEAAMEELAKLEYLDSGKPLAWCKADIEDSVACLRYYAGSADKIQGSMIELDDKHKHALARKEPIGVCAQIVPWNYPLLMMIWKIAPALAAGCTIVFKPAEQTPLSTLKFAELFELAGYPAGVFNLVNGLGRTTGDALSRHMDVDKIAFTGSTITGRRIAIAAAESNLKSVTLELGGKSANIVFDDANLQEAAKWAAFGVYENMGQSCSAGSRVLVQESIYDQFITHFKAAAEAFKVGDPADPDTFQGPQVNEAQFRKVLDYIESGKRSGAKLLTGGSRHGSRGYFIQPTVFGDVTMDMKIAREEIFGPVASVIRFKDEADAISIANNTEYGLAAAVHSQNYARVQRVTRKLKAGTVWINQYVALSHQVPFGGYKQSGWGRELGLEGLEPYLITKSVHHYYGGDFEWPIKI

SEQ ID NO: 69 - DNA, 1783 bp, Cryptococcus neoformans var. neoformans B-3501A
  CDS (45)..(1730)
caagttatttaaaactctacgagcttttcctctcaacaaaagacatgccaataagatcgcccacttctctttccctcaaaagatccagccacttcacaactgccacacgacgactgcacacttccacacctaccctcatcgctgctgcctctctctccaaaaagctccaacgtttcagccctcagctcacgccccgccttcttgcaccaaacggatcgcgaacaatgtccaactggcccaaagtcacctctgagaacccccttggtctcgacgacccttctctcttcatccagaagggcttcatcaacggccagtatgtcggtacccaatccggcaagactttcgaggtcaacgaccctgcctctggcaagaccatcggtacttgccccgagatgaccgttgaggacactcgtcacgctatcgaagtcgccgaaaaggcctttgccactttccgtaacaccagccctgttcagcgttccaattggctctccgagctctaccgtctctaccaggcttctatcaaggacatcgcccgtttgatcgtttgggagaacggcaagtcttggaacgacgctatggccgaggccacttatgccggtaccttcttctcatggttcgcgggtgaggctctcaggacctatggcgacgtcattccttgctctgtccccggtaccaggaacttttccatcaagcagcccatcggtgttgttgctttgctttgcccatggaacttccccgctgctatgattgccaggaagatgggtcccgctctcgctgtcggatgcacttctgtcatcaagactccttccgagactcccttcactactcttgccatcatcgagcttgcccgacgagccggcattcccgacggcgtcatcaacgtcatcaccactgacgccaacctccaggatgtcggcaaggaactctgtaccaaccctgccgtccacaaggtctccttcactggttcaacccgagtcggcaagatccttgcttctcagtgctcttcaaccctcaagaagatgtctctcgagctcggtggtaacgctcctctcattgtctttgaagacgccgacatccctaccgccgttgccggtaccatcgcttccaagttccgaggttcaggtcagacttgcgtctgtgccaacagaatctacgtccacgaagccatctatgacgaatttgcaaagaagctcgccgagaaagtcgccgaattcaaggtcggtcccggtttcggagaaggtgttacccacggtcctttgatccattctcggcaggccgacaaggtggaggagcacgtccaagatgctatcaagaagggcgccaaggttctcgttggtggcaagcgaggaaatggtaccgaatacatccccaccgtcctcaccaatgtcagcgacgaatgcttgatcgctaccgaggagactttcggtcccgttgcagctctcttccgattctcttctgaagaggaagttgtggcgagggccaaccgtgccgaagtcggtcttgctggctacttcttctccagggactctgacaggatctggagggttgccgaggcccttgagaccggtatggtcggtgccaacaccggtatgatctctcaagccgtcattccctttggtggtatcaaggagtctggttatggcaaggaaggcggtcgacaaggtacggaggagtacaccatcaccaagcttgtagccgtcggcacttcattgcacaacatgccaaagtaaaagaagaaaggggggaatgtataaaagaagctactggaactattccaaaactc

SEQ ID NO: 70 - protein, 561 aa, Cryptococcus neoformans var. neoformans B-3501A
MPIRSPTSLSLKRSSHFTTATRRLHTSTPTLIAAASLSKKLQRFSPQLTPRLLAPNGSRTMSNWPKVTSENPLGLDDPSLFIQKGFINGQYVGTQSGKTFEVNDPASGKTIGTCPEMTVEDTRHAIEVAEKAFATFRNTSPVQRSNWLSELYRLYQASIKDIARLIVWENGKSWNDAMAEATYAGTFFSWFAGEALRTYGDVIPCSVPGTRNFSIKQPIGVVALLCPWNFPAAMIARKMGPALAVGCTSVIKTPSETPFTTLAIIELARRAGIPDGVINVITTDANLQDVGKELCTNPAVHKVSFTGSTRVGKILASQCSSTLKKMSLELGGNAPLIVFEDADIPTAVAGTIASKFRGSGQTCVCANRIYVHEAIYDEFAKKLAEKVAEFKVGPGFGEGVTHGPLIHSRQADKVEEHVQDAIKKGAKVLVGGKRGNGTEYIPTVLTNVSDECLIATEETFGPVAALFRFSSEEEVVARANRAEVGLAGYFFSRDSDRIWRVAEALETGMVGANTGMISQAVIPFGGIKESGYGKEGGRQGTEEYTITKLVAVGTSLHNMPK

SEQ ID NO: 71 - DNA, 1470 bp, Burkholderia vietnamiensis G4
  CDS (1)..(1470): transl_table=11
atgtccgtatacggtttgcagcgcctgtacatcggcggcgcttatgtcgacgccaccagcggcaagactttcgacaccttcgatcccgccaccggcgagctgctcgcgcaggtgcagcaagcgagcgcggccgacgtcgaccgcgcggtcgcctcggcgcagcaagggcagcgcgaatgggcggcgctgaccgcgatgcagcgctcgcgcatcctgcgccgcgcggtcgatctgctgcgcgagcgcaacgacgaactcgcggcgatcgagacgcgcgacaccggcaagccgatcggcgagacgctcgcggtcgacatcgtcaccggcgcggacgtgatcgagtactacgcgggcctcgcgaccgcgatcgaagggctgcaggtgccgttgcgcgccgagtcgttcgtctacacgcgccgcgagccgctcggcgtgtgcgcgggcatcggcgcatggaactacccgatccagatcgcatgctggaagacggcgcccgcgctcgcggccggcaacgcgatggtgttcaagccgagcgaggtcacgccgctcaccgcgctgaagctcgccgagatctatacggaagccggcgtgccggccggcgtgttcaacgtcgtgcagggcgacggctcggtcggtgcgctgctgaccggtcacccggacatcgcgaaggtgtcgttcacgggcggcgtcgagaccggcaagaaggtgatgtcgctggccggcgcgtcgtcgctgaaggaagtgacgatggagctcggcggcaagtcgccgctgatcgtgttcgacgatgccgacctcgatcgcgcggccgacatcgcggtgatcgccaacttcttcagctcgggccaggtctgcaccaacggcacgcgcgtgttcgtgcagcgctcgatcaaggacgcgttcaccgccaaggtgctcgaacgcgtgaagcggatccgcgtgggcaagccgaccgatgccgacaccaacttcggcccgctcgtgtcggccgcgcagctcgacaaggtgctcggcttcatcgccagcggcaaggcggaaggcgcgaagctgctggccggcggcacgcggctcaccgacggccatttcgccgacggccagtacgtcgcgccgacggtattcggcgactgccgcgacgacatgaagatcgtgcgcgaggaaatcttcgggccggtgatgagcatcctcgatttcgaatcggaggacgaagtgatcgcgcgcgcgaacgacacgcactacggcctcgcggccggcgtcgtcacggagaacctgtcgcgcgcgcatcgcacgatccatcgcctcgaagccggcatctgctggatcaacacgtggggcgaatcgccggccgagatgccggttggcggatacaagcaatccggtgtcgggcgcgagaacggcatcacgacgctcgaacactacactcggatcaaatcggtacaggtcgaactcggccgctacaacccggtgttttga

SEQ ID NO: 72 - protein, 489 aa, Burkholderia vietnamiensis G4
MSVYGLQRLYIGGAYVDATSGKTFDTFDPATGELLAQVQQASAADVDRAVASAQQGQREWAALTAMQRSRILRRAVDLLRERNDELAAIETRDTGKPIGETLAVDIVTGADVIEYYAGLATAIEGLQVPLRAESFVYTRREPLGVCAGIGAWNYPIQIACWKTAPALAAGNAMVFKPSEVTPLTALKLAEIYTEAGVPAGVFNVVQGDGSVGALLTGHPDIAKVSFTGGVETGKKVMSLAGASSLKEVTMELGGKSPLIVFDDADLDRAADIAVIANFFSSGQVCTNGTRVFVQRSIKDAFTAKVLERVKRIRVGKPTDADTNFGPLVSAAQLDKVLGFIASGKAEGAKLLAGGTRLTDGHFADGQYVAPTVFGDCRDDMKIVREEIFGPVMSILDFESEDEVIARANDTHYGLAAGVVTENLSRAHRTIHRLEAGICWINTWGESPAEMPVGGYKQSGVGRENGITTLEHYTRIKSVQVELGRYNPVF

SEQ ID NO: 73 - DNA, 1509 bp, Oryza sativa (japonica cultivar-group)
  CDS (1)..(1509)
atggcggcggcgaacggcggcgacagcaaggggttcgaggtgccgaagctggagatcaagttcaccaagctcttcatcaatggccgcttcgtcgacgccgtctccggcaagacattcgaaacccgtgacccgcgcaccggcgaggtcatcgccaagatcgccgaaggagacaaggccgacatcgacctcgccgtgaaggccgccagggaggccttcgaccatggcccctggccaagaatgtccggctttgcgaggggaaggatcctgcacaagttcgcggacctggtggagcagcacgtggaggagctggcggcgctggacacggtggacgccggcaagctgttcgcgatggggaagctcgtcgacatccccggcggcgcgaacctgctccggtactacgccggcgcggcggacaaggtgcacggcgagacgctcaagatggcgcggccatgccacgggtacacgctcaaggagcccgtcggcgtcgtcggccacatcgtgccgtggaactaccccaccaccatgttcttcttcaaggccagcccggcgctcgccgccggctgcaccatggtcgtcaagcccgccgagcagacccccctctccgcgctcttctacgcccacctcgccaagcttgccggcgtccccgacggcgtgctcaacgtcgtccccggcttcggccccaccgccggcgccgctatctcctcccacatggacattgacaaggtgagcttcaccggctcgacggaggtcggccggctggtgatggaggcggcggcgaagagcaacctgaagcccgtctcgctcgagctgggtggcaagtctccggtcatcgtgttcgacgacgccgacctcgacacggccgtgaacctggtccacatggcctcctacaccaacaagggtgagatctgcgtcgccggctcgcgaatctatgtccaggaggggatctacgatgcgttcgtgaagaaggcgaccgagatggccaagaaatcggtggtcggagatccgttcaacccgcgagttcatcaaggccctcagattgacaaggagcaatacgagaagatcctcaagtacatcgacatcggtaagcgcgaaggcgcgacgttggtcaccggagggaagccctgcggcgaaaacgggtactacatcgagcccaccatcttcacggacgtcaaggaagaaatgtcgatcgcgcaagaggaaatcttcgggccggtgatggccctcatgaaattcaagacggttgaggaggcgatccagaaggcgaacagcacccggtacggcctggctgccggcatagtcaccaagaacatcgacgtcgcgaacacggtttcgcggtcgatccgggcaggggcaatctggatcaattgctacctcggcttcgaccccgacgtgccgttcggggggtacaagatgagcggcttcggcaaggacatgggcatggacgcccttgagaagtacctccacaccaaggcggtggtcacccctctctacaacaccccttggctatga

SEQ ID NO: 74 - protein, 502 aa, Oryza sativa (japonica cultivar-group)
MAAANGGDSKGFEVPKLEIKFTKLFINGRFVDAVSGKTFETRDPRTGEVIAKIAEGDKADIDLAVKAAREAFDHGPWPRMSGFARGRILHKFADLVEQHVEELAALDTVDAGKLFAMGKLVDIPGGANLLRYYAGAADKVHGETLKMARPCHGYTLKEPVGVVGHIVPWNYPTTMFFFKASPALAAGCTMVVKPAEQTPLSALFYAHLAKLAGVPDGVLNVVPGFGPTAGAAISSHMDIDKVSFTGSTEVGRLVMEAAAKSNLKPVSLELGGKSPVIVFDDADLDTAVNLVHMASYTNKGEICVAGSRIYVQEGIYDAFVKKATEMAKKSVVGDPFNPRVHQGPQIDKEQYEKILKYIDIGKREGATLVTGGKPCGENGYYIEPTIFTDVKEEMSIAQEEIFGPVMALMKFKTVEEAIQKANSTRYGLAAGIVTKNIDVANTVSRSIRAGAIWINCYLGFDPDVPFGGYKMSGFGKDMGMDALEKYLHTKAVVTPLYNTPWL

SEQ ID NO: 75 - DNA, 1524 bp, Oryza sativa (japonica cultivar-group)
  CDS (1)..(1524)
atggggagcaccggcgactgcggcaatggaaaggcggccgccggcggcggcgggttggtggtgccggagatcaagttcaccaagctcttcatcaacggcgagttcgtcgacgccgcctcgggcaagacattcaagacaagggacccacgaacaggcgatgtcctggcccacatcgcagaggcagacaaggctgatgtggacctcgccgtcaaggccgcgagagaggccttcgagcacggcaagtggccccgcatgtcaggctatgagaggagcagggtgatgaacaagctggccgacctggtggagcagcacgccgacgagctggcggcgctggacggcgccgacgccgggaagctgctgacgctgggcaagatcatcgacatgcccgccgcggcgcagatgatgcggtactacgccggcgcggccgacaagatccacggcgagtcccttcgggtggccggcaagtaccaggggtacaccctcagggagcccatcggcgtcgtcggcgtcatcatcccctggaacttccccaccatgatgttcttcctcaaggtcagccccgccctcgccgccggctgcaccatcgtcgtcaagcccgccgagcagacgcccctctccgctctgtactacgctcacctcgccaagctggctggagttccggatggagtgatcaacgtcgtcccgggattcgggccgacagccggtgcggcactctcctcccacatggacgtcgacagtgttgctttcactggctctgctgaaatcggccgtgccatcatggagtcggcggcgcggagcaacctgaagaatgtgtctcttgagctcggcggcaagtctccgatgatagtcttcgacgacgccgatgtcgacatggctgtcagtctgtcatcccttgcagttttcttcaacaagggagagatttgcgtggccgggtcacgcgtctatgtccaagaagggatctacgatgagtttgtgaagaaggccgtggaggctgccaagaactggaaagttggagacccttttgatgctgccaccaatatgggtcctcaggttgacaaggtccaatttgagagggttctcaagtacattgagatcggcaagaacgagggagcaaccctactcacaggtggcaaacccactggtgacaaaggatactacattgagcctaccatatttgtggatgtcaaggaggaaatgacgattgcgcaagaggagatcttcggcccggtgatgtccctcatgaagttcaagacggtggaggaggcgatagagaaggccaactgcaccaagtacgggctggctgccggcattgtgaccaagaacctcaacattgccaacatggtgtcgaggtcagtgcgggccggcacggtgtgggtgaactgctacttcgccttcgaccccgacgcgccgttcggcgggtacaagatgagcgggttcggccgggaccaagggatggtcgccatggacaagtacctgcaggtcaagaccgtcatcaccgccgtcccggactcgccctggtactga

SEQ ID NO: 76 - protein, 507 aa, Oryza sativa (japonica cultivar-group)
MGSTGDCGNGKAAAGGGGLVVPEIKFTKLFINGEFVDAASGKTFKTRDPRTGDVLAHIAEADKADVDLAVKAAREAFEHGKWPRMSGYERSRVMNKLADLVEQHADELAALDGADAGKLLTLGKIIDMPAAAQMMRYYAGAADKIHGESLRVAGKYQGYTLREPIGVVGVIIPWNFPTMMFFLKVSPALAAGCTIVVKPAEQTPLSALYYAHLAKLAGVPDGVINVVPGFGPTAGAALSSHMDVDSVAFTGSAEIGRAIMESAARSNLKNVSLELGGKSPMIVFDDADVDMAVSLSSLAVFFNKGEICVAGSRVYVQEGIYDEFVKKAVEAAKNWKVGDPFDAATNMGPQVDKVQFERVLKYIEIGKNEGATLLTGGKPTGDKGYYIEPTIFVDVKEEMTIAQEEIFGPVMSLMKFKTVEEAIEKANCTKYGLAAGIVTKNLNIANMVSRSVRAGTVWVNCYFAFDPDAPFGGYKMSGFGRDQGMVAMDKYLQVKTVITAVPDSPWY

SEQ ID NO: 77 - DNA, 1662 bp, Oryza sativa (japonica cultivar-group)
  CDS (1)..(1662)
atggcggcaaggagggctgcttcctccctcctctctcgcggcctcatcgcgaggccttctgctgcctcctccactggcgactccgctatccttggagcaggctcagcacggggcttcttgcctggatcacttcacagattcagcgctgcaccggccgccgctgccaccgccgcagccactgaggagccgatccagccgccggtggacgtgaagtacaccaagctcctcatcaatggcaacttcgtcgatgcagcatctgggaagacgttcgcgacggtggatccccgcaccggcgatgtcattgcccgcgtggccgagggcgacgcggaggacgtcaaccgcgccgtcgccgccgcccgccgggccttcgacgagggcccgtggccgcggatgaccgcctacgagcggtgcagggtgttgctgcggttcgcggacctgatcgagcagcacgccgatgagatcgcggcgctggagacgtgggacggcgggaagacgctggagcagacgacggggacggaggtgccgatggtggcgcggtacatgcggtactacggcgggtgggcggacaagatccacggcctcgtcgtgccggcggatgggccacaccacgtgcaggtgctacacgagcccatcggcgtggccgggcagatcatcccctggaacttcccgctgctcatgttcgcctggaaggtcggcccggcgctcgcctgcggcaacgccgtcgtgctcaagaccgccgagcagacgccgctctccgcgctcttcgtcgccagcctgctccacgaggctggcctccccgacggcgttctcaacgtcgtctccggctttggtccgaccgccggcgccgctctctccagccacatgggtgtcgacaagcttgcattcaccggttcgacgggcacgggcaagatcgtgcttgagctggccgcaaggagcaaccttaagccggtgacgctggagctcggaggcaaatcacctttcatcgtcatggatgacgccgatgtcgaccaggccgtcgagcttgcgcaccgcgcgctcttcttcaaccaggggcaatgctgctgcgcggggtcacgcacgttcgtgcacgagcgcgtctacgacgagttcgtggagaaggccagggctcgcgctctgcagcgtgtggtcggcgacccattcaggacaggcgtcgagcaggggcctcagatcgacggcgagcaattcaagaagatcttgcagtacgtcaagtcgggcgtggacagtggcgccacactcgtggccggcggcgacagggcgggcagcagggggttctacatccagccaaccgtctttgcagacgtcgaggacgaaatgaagatcgcgcaggaggagatattcgggccggtgcagtccatcctcaagttcagcacggtggaggaggtggtgcggagggcgaacgcgacgccatacgggctggcggcgggggtgttcacccagaggctggacgcggcgaacaccctggcgcgggcattgagggtcgggacggtgtgggtgaacacctacgacgtgttcgacgcggccgtcccgttcggcggctacaagatgagcggcgttggcagggagaagggcgtctacagcctccgcaactacctccagaccaaggccgtcgtcacgcccatcaaggacgccgcctggttgtag

SEQ ID NO: 78 - protein, 553 aa, Oryza sativa (japonica cultivar-group)
MAARRAASSLLSRGLIARPSAASSTGDSAILGAGSARGFLPGSLHRFSAAPAAAATAAATEEPIQPPVDVKYTKLLINGNFVDAASGKTFATVDPRTGDVIARVAEGDAEDVNRAVAAARRAFDEGPWPRMTAYERCRVLLRFADLIEQHADEIAALETWDGGKTLEQTTGTEVPMVARYMRYYGGWADKIHGLVVPADGPHHVQVLHEPIGVAGQIIPWNFPLLMFAWKVGPALACGNAVVLKTAEQTPLSALFVASLLHEAGLPDGVLNVVSGFGPTAGAALSSHMGVDKLAFTGSTGTGKIVLELAARSNLKPVTLELGGKSPFIVMDDADVDQAVELAHRALFFNQGQCCCAGSRTFVHERVYDEFVEKARARALQRVVGDPFRTGVEQGPQIDGEQFKKILQYVKSGVDSGATLVAGGDRAGSRGFYIQPTVFADVEDEMKIAQEEIFGPVQSILKFSTVEEVVRRANATPYGLAAGVFTQRLDAANTLARALRVGTVWVNTYDVFDAAVPFGGYKMSGVGREKGVYSLRNYLQTKAVVTPIKDAAWL

SEQ ID NO: 79 - DNA, 1650 bp, Oryza sativa (japonica cultivar-group)
  CDS (1)..(1650)
atggctgccgctgctgcaaggaggggctcatcgctgctctctcgctgcctgctgtccaggcccgccgccgccgcctcgcctgctgtcccctctgcgctccgcagggcagatgggacacaaggattgttgccgggaatccttcagaggttcagcactgcagcagtagcagaggagcccatatcacccccagtccaagtgaactacactcagctcctcattgatggaaaattcgttgattcagcatctggcaaaactttcccaactctggaccctcgtaccggggagctgattgcccatgtggctgaaggcgatgcggaggatattaaccgtgcggttcatgcggcccgcaaggctttcgatgaagggccatggccaaagatgactgcctatgagagatcccggattctgttgcggtttgctgacttgattgagaagcacaacgatgaaattgctgcattggagacatgggacaacggcaagccgtatgcgcaagctgccaacattgaagtgccaatggtggcacggctgatgcggtactatgctggttgggctgacaagatccatgggcttgtcgtgccggctgacggcccacaccatgtacaggtgctgcacgagcccattggtgtcgcaggtcagatcatcccatggaactttccgcttctgatgtttgcgtggaaagttggccctgctttggcttgtggaaacactgttgtgctcaagacggctgagcaaactcctctgtctgctctatttgcttctaagctgttgcatgaggctggactcccagacggtgttgttaacgtggtatctggttttggacctactgctggtgctgctcttgctagtcacatggatgtcgataagattgcattcactggatcgaccgatactggaaaagtcgtccttgagttggctgcaaggagcaaccttaagtcagtgacactggagctaggaggcaagtctcctttcatcatcatggatgatgctgatgttgaccatgctgttgagcttgcgcattttgcactgttctttaaccagggacaatgttgctgtgctgggtctcgtacatttgtgcatgagcgtatctatgatgagttcgtggagaaggccaaggctcgtgctctcaagcgtgtggttggtgatccattcaagaatggtgttgaacagggccctcagattgatgacgagcaattcaacaagatcttgcgctacatcaagtatggtgttgacagtggagccaaccttgtgactggtggcgacagattaggtgacaaaggttactacatccagccaacaattttctcggatgtacaggataacatgaggattgctcaagaagagatatttggccctgtgcagtccattctgaagttcaatgatctgaacgaggtcatcaagagggcaaatgcaagccagtacgggctggctgctggggtcttcaccaacaacctgaacacggccaacaccctgacccgcgcgctcagggtcgggaccgtgtgggtgaactgcttcgacgtcttcgacgccgcgatcccgttcggcggatacaagcagagcggcatcgggagggagaagggcatcgacagcctgaagaactacctgcaggtcaaggccgtcgtcacgccgatcaagaacgccgcgtggttgtaa

SEQ ID NO: 80 - protein, 549 aa, Oryza sativa (japonica cultivar-group)
MAAAAARRGSSLLSRCLLSRPAAAASPAVPSALRRADGTQGLLPGILQRFSTAAVAEEPISPPVQVNYTQLLIDGKFVDSASGKTFPTLDPRTGELIAHVAEGDAEDINRAVHAARKAFDEGPWPKMTAYERSRILLRFADLIEKHNDEIAALETWDNGKPYAQAANIEVPMVARLMRYYAGWADKIHGLVVPADGPHHVQVLHEPIGVAGQIIPWNFPLLMFAWKVGPALACGNTVVLKTAEQTPLSALFASKLLHEAGLPDGVVNVVSGFGPTAGAALASHMDVDKIAFTGSTDTGKVVLELAARSNLKSVTLELGGKSPFIIMDDADVDHAVELAHFALFFNQGQCCCAGSRTFVHERIYDEFVEKAKARALKRVVGDPFKNGVEQGPQIDDEQFNKILRYIKYGVDSGANLVTGGDRLGDKGYYIQPTIFSDVQDNMRIAQEEIFGPVQSILKFNDLNEVIKRANASQYGLAAGVFTNNLNTANTLTRALRVGTVWVNCFDVFDAAIPFGGYKQSGIGREKGIDSLKNYLQVKAVVTPIKNAAWL

SEQ ID NO: 81 - DNA, 1512 bp, Oryza sativa (japonica cultivar-group)
  CDS (1)..(1512)
atggccacggcgatcccgcagcggcagctcttcgtcgccggcgagtggcgcgcccccgcgctcggccgccgcctccccgtcgtcaaccccgccaccgagtcccccatcggcgagatcccggcgggcacggcggaggacgtggacgcggcggtggcggcggcgcgggaggcgctgaagaggaaccggggccgcgactgggcgcgcgcgccgggcgccgtccgggccaagtacctccgcgcaatcgcggccaagataatcgagaggaaatctgagctggctagactagagacgcttgattgtgggaagcctcttgatgaagcagcatgggacatggacgatgttgctggatgctttgagtactttgcagatcttgcagaatccttggacaaaaggcaaaatgcacctgtctctcttccaatggaaaactttaaatgctatcttcggaaagagcctatcggtgtagttgggttgatcacaccttggaactatcctctcctgatggcaacatggaaggtagctcctgccctggctgctggctgtacagctgtactaaaaccatctgaattggcttccgtgacttgtttggagcttgctgatgtgtgtaaagaggttggtcttccttcaggtgtgctaaacatagtgactggattaggttctgaagccggtgctcctttgtcatcacaccctggtgtagacaaggttgcatttactgggagttatgaaactggtaaaaagattatggcttcagctgctcctatggttaagcctgtttcactggaacttggtggaaaaagtcctatagtggtgtttgatgatgttgatgttgaaaaagctgttgagtggactctctttggttgcttttggaccaatggccagatttgcagtgcaacatcgcgtcttattcttcataaaaaaatcgctaaagaatttcaagaaaggatggttgcatgggccaaaaatattaaggtgtcagatccacttgaagagggttgcaggcttgggcccgttgttagtgaaggacagtatgagaagattaagcaatttgtatctaccgccaaaagccaaggtgctaccattctgactggtggggttagacccaagcatctggagaaaggtttctatattgaacccacaatcattactgatgtcgatacatcaatgcaaatttggagggaagaagtttttggtccagtgctctgtgtgaaagaatttagcactgaagaagaagccattgaattggccaacgatactcattatggtctggctggtgctgtgctttccggtgaccgcgagcgatgccagagattaactgaggagatcgatgccggaattatctgggtgaactgctcgcaaccctgcttctgccaagctccatggggcgggaacaagcgcagcggctttggacgcgagctcggagaagggggcattgacaactacctaagcgtcaagcaagtgacggagtacgcctccgatgagccgtggggatggtacaaatccccttccaagctgtaa

SEQ ID NO: 82 - protein, 503 aa, Oryza sativa (japonica cultivar-group)
MATAIPQRQLFVAGEWRAPALGRRLPVVNPATESPIGEIPAGTAEDVDAAVAAAREALKRNRGRDWARAPGAVRAKYLRAIAAKIIERKSELARLETLDCGKPLDEAAWDMDDVAGCFEYFADLAESLDKRQNAPVSLPMENFKCYLRKEPIGVVGLITPWNYPLLMATWKVAPALAAGCTAVLKPSELASVTCLELADVCKEVGLPSGVLNIVTGLGSEAGAPLSSHPGVDKVAFTGSYETGKKIMASAAPMVKPVSLELGGKSPIVVFDDVDVEKAVEWTLFGCFWTNGQICSATSRLILHKKIAKEFQERMVAWAKNIKVSDPLEEGCRLGPVVSEGQYEKIKQFVSTAKSQGATILTGGVRPKHLEKGFYIEPTIITDVDTSMQIWREEVFGPVLCVKEFSTEEEAIELANDTHYGLAGAVLSGDRERCQRLTEEIDAGIIWVNCSQPCFCQAPWGGNKRSGFGRELGEGGIDNYLSVKQVTEYASDEPWGWYKSPSKL

SEQ ID NO: 83 - DNA, 1563 bp, Saccharomyces cerevisiae
  CDS (1)..(1563)
atgctttctcgcacaagagctgcagctccgaattccagaatattcactagaagcttgttacgtctttattctcaagcaccattacgcgttccaattactcttccaaatggtttcacctacgaacagccaacagggttattcatcaatggtgaatttgttgcctcgaagcaaaagaaaacgtttgacgtgatcaatccatctaacgaagaaaagataacaactgtatacaaggctatggaagatgatgttgatgaagccgttgcagcggctaaaaaagcttttgaaacgaagtggtctattgtagagccggaggttcgcgctaaagctttattcaatctcgctgacttggttgagaaacaccaagaaacactggctgccattgagtcaatggataatggtaagtcattgttttgtgcgcgcggtgacgtcgctttagtatctaaatacttgcgttcttgcggtggttgggcagataaaatctacggtaacgttattgacacaggtaaaaaccattttacctactcaattaaggaaccattaggcgtttgcggccaaataatcccttggaacttccctttattgatgtggtcatggaaaattgggcctgctctggctacaggtaacaccgtcgtattgaaacccgctgaaacaacacctttatctgcccttttcgcttcccagttgtgtcaggaagcaggcatacccgctggtgtagtcaatatccttccgggttccggtagagttgttggagaaagattgagtgcacacccagacgtgaagaagattgcttttacaggctctactgccaccggccgccatattatgaaggtcgctgccgatactgtcaagaaagtcactttggagctgggaggtaaatcaccaaatattgtgtttgctgacgctgatctagataaagccgtcaagaacattgccttcggtattttttacaactctggtgaagtttgctgcgctggttccagaatatacattcaagatacagtatacgaggaggtgttgcaaaaactaaaggattacaccgagtcactaaaggtcggtgacccatttgatgaggaagttttccaaggtgctcaaacatctgacaaacagctgcataaaattttagactatgtcgatgtagcaaaatcagagggggctcgtcttgtgactggaggggccagacatggcagtaaaggttattttgtcaagccaacagtgtttgctgatgtcaaaggagatatgagaattgttaaggaggaagtgtttggtcccattgtaactgtatccaagttttctactgttgatgaagtgattgctatggcaaatgattctcaatatgggttagccgcaggtattcacactaacgatattaacaaggctgttgatgtgtccaaaagagtgaaagctggtactgtttggataaatacctataacaacttccaccaaaatgttcctttcggtggcttcggccagtcaggtattggccgtgaaatgggtgaggctgctttaagtaactacactcaaacaaaatctgtcagaattgccattgacaagccaattcgttga

SEQ ID NO: 84 - protein, 520 aa, Saccharomyces cerevisiae
MLSRTRAAAPNSRIFTRSLLRLYSQAPLRVPITLPNGFTYEQPTGLFINGEFVASKQKKTFDVINPSNEEKITTVYKAMEDDVDEAVAAAKKAFETKWSIVEPEVRAKALFNLADLVEKHQETLAAIESMDNGKSLFCARGDVALVSKYLRSCGGWADKIYGNVIDTGKNHFTYSIKEPLGVCGQIIPWNFPLLMWSWKIGPALATGNTVVLKPAETTPLSALFASQLCQEAGIPAGVVNILPGSGRVVGERLSAHPDVKKIAFTGSTATGRHIMKVAADTVKKVTLELGGKSPNIVFADADLDKAVKNIAFGIFYNSGEVCCAGSRIYIQDTVYEEVLQKLKDYTESLKVGDPFDEEVFQGAQTSDKQLHKILDYVDVAKSEGARLVTGGARHGSKGYFVKPTVFADVKGDMRIVKEEVFGPIVTVSKFSTVDEVIAMANDSQYGLAAGIHTNDINKAVDVSKRVKAGTVWINTYNNFHQNVPFGGFGQSGIGREMGEAALSNYTQTKSVRIAIDKPIR

SEQ ID NO: 85 - DNA, 1497 bp, Bacillus halodurans C-125
  CDS (1)..(1497): transl_table=11
atgcaaaaaatctcaacaaacgatagcaaattaaatccaaggttagtggcgtttttaaacggtggaccaaagaagctatttattaatggggaatgggttgattcattctctggacaatcttttgaaacgatgaatccagcaaccggagaaacattagctctcgtagcagaagctgggtcagaggacatcgattttgcagtgaaagcggcaaggaaagcgttcgatgaagggccttggtctaaaatgagcgcagcggaaagaagtcgactcatatacaagctggctgatttgattgaggatcataaagaagcgttagctcagcttgagacgttagataatggtaagccaattcgtgagacggccaatgctgatattccattagtaattgaacactttcgttactttgcagggtgggcgacaaaaattgtgggccaaaccatccctgtacaaggccattattttaactacacgcgccatgaagccattggcgttgtgggccaaatcattccttggaatttcccgttattgatggctgcttggaaacttggtgccgctctagctacaggttgtacggttgtgttaaaaccggcagagcagactccactttccgccttatatttaggagaattgatcaatgaagcaggttttccaaaaggggttgtgaacattgtccctggatttgggcattcggctggaactccccttgtgaatcacccagctgtagataaagtggcttttacagggtcgactgatgtcggaaagttaattatgaaacaagcgagtgaatcattaaaaagagtaacgcttgaacttgggggcaagtcaccaaatatcattttacctgatgctgatttgtcaaaggccgttcctggctcacttatgggcattatgttcaatcaaggccaagtgtgttgcgcaggaagtcgtttatatgtacaaaagaaacagtatgatcatgtcgttgctgacctggtgtcgttaacgaacgagattcagcaaggggatggattattagaacaaacgaccatgggacctctgatttcaaatcaacaacaaagtcgagtgaaaaattacatcgatcgtggggttgaggaaggggcagaactactaacaggtgggaacattccgtatgatcaagggtattttgtcgccccaaccatttttgctgacgtggatcattccatgacgatcgccaaggaggaaatttttggtccagttgtagccgcaatgccgtttgatagcatagacgacctaattgataaagccaacgattctgattatggactagctgccggtgtttggacacaggatattaaaaaagcacactacattgcccaccgaatcaaggcagggaccatttgggtgaattgctacaatgtattcgatgccgcgagcccgtttggtggttacaaacaatcggggattggccgggaaatggggagctatgcattagaaaattatactgaagtgaaaagtgtttgggtgaatatggattaa

SEQ ID NO: 86 - protein, 498 aa, Bacillus halodurans C-125
MQKISTNDSKLNPRLVAFLNGGPKKLFINGEWVDSFSGQSFETMNPATGETLALVAEAGSEDIDFAVKAARKAFDEGPWSKMSAAERSRLIYKLADLIEDHKEALAQLETLDNGKPIRETANADIPLVIEHFRYFAGWATKIVGQTIPVQGHYFNYTRHEAIGVVGQIIPWNFPLLMAAWKLGAALATGCTVVLKPAEQTPLSALYLGELINEAGFPKGVVNIVPGFGHSAGTPLVNHPAVDKVAFTGSTDVGKLIMKQASESLKRVTLELGGKSPNIILPDADLSKAVPGSLMGIMFNQGQVCCAGSRLYVQKKQYDHVVADLVSLTNEIQQGDGLLEQTTMGPLISNQQQSRVKNYIDRGVEEGAELLTGGNIPYDQGYFVAPTIFADVDHSMTIAKEEIFGPVVAAMPFDSIDDLIDKANDSDYGLAAGVWTQDIKKAHYIAHRIKAGTIWVNCYNVFDAASPFGGYKQSGIGREMGSYALENYTEVKSVWVNMD

SEQ ID NO: 87 - DNA, 1488 bp, Bacillus subtilis subsp. subtilis str. 168
  CDS (1)..(1488): transl_table=11
atgagttctttaacgatgcaagtgacgaaaaggctggagacatttttacagggaacaaagaagctttatattgacggaaagtttgttccgagtgcctcaggggcaacctttgacactccaaacccggcgaccggcgaaaccttgatgacgctgtatgaagcccaggctgcggatgtggacaaagctgttaaagctgcccggaaagcctttgaccaaggtgaatggagaacaatgtctccagcttcgagaagcagactgatgtataagctggcagacttaatggaagagcataaaactgagcttgctcagcttgaaacacttgataatgggaaaccgatcaatgaaacgactaatggagatattccgctggctattgagcatatgcgctattacgccggctggtgtacaaaaataacaggacagacgattccggtttccggcgcttattttaattatacgcgtcatgagcctgtcggtgtcgtcggccagatcattccatggaatttcccgctcctgatggcgatgtggaaaatgggcgcggcacttgcaacaggctgtacaatcgtcctcaaaccggctgaacaaacaccgctttcagctctttatttggcagaattaattgaccaagccggtttccctgccggtgtaatcaacatcatcccaggattcggtgaagatgcgggagaagcgctgacgaaccacgaagcggttgataaaattgcctttaccggttccactgaaatcggaaagaaaatcatgtccaccgcagcgaaaagcattaagcgtgtgacattggagctgggcggaaaatcgcctaatattcttctgccggatgcgaatttaaaaaaagccatcccgggcgctttaaacggtgtgatgtttaaccagggccaagtctgctgtgcgggctcacgtgtcttcattcataaagaccaatatgatgaagttgttgatgaaatggcatcctatgctgagtcactccgccaaggagcgggacttcataaagatactcaaatcgggcctctcgtaagcaaggaacagcatgagcgcgttctttcctatattcaaaaaggaaaagatgaaggagcaaaagcagtgaccggcggaagctgtccttttgaagcaggatattttgtcgcaccgactgtgtttgcgaatgttgaagacgaaatgaccatcgcaaaagaagaaattttcggacccgtgctgactgcaattccgtacgaaacagtcgatgaagttattgaacgggcaaaccattcagaatatgggcttgcagccggactatggacagagaacgtcaagcaggctcactatatcgcggaccgacttcaagccggaaccgtttgggtcaactgctataatgtgtttgacgcggcgtctccatttggcggttataaacagtcaggactcggacgagaaatgggatcatatgccttggataattacacagaagtcaaaagtgtatgggtaaaccttgaagactaa

SEQ ID NO: 88 - protein, 495 aa, Bacillus subtilis subsp. subtilis str. 168
MSSLTMQVTKRLETFLQGTKKLYIDGKFVPSASGATFDTPNPATGETLMTLYEAQAADVDKAVKAARKAFDQGEWRTMSPASRSRLMYKLADLMEEHKTELAQLETLDNGKPINETTNGDIPLAIEHMRYYAGWCTKITGQTIPVSGAYFNYTRHEPVGVVGQIIPWNFPLLMAMWKMGAALATGCTIVLKPAEQTPLSALYLAELIDQAGFPAGVINIIPGFGEDAGEALTNHEAVDKIAFTGSTEIGKKIMSTAAKSIKRVTLELGGKSPNILLPDANLKKAIPGALNGVMFNQGQVCCAGSRVFIHKDQYDEVVDEMASYAESLRQGAGLHKDTQIGPLVSKEQHERVLSYIQKGKDEGAKAVTGGSCPFEAGYFVAPTVFANVEDEMTIAKEEIFGPVLTAIPYETVDEVIERANHSEYGLAAGLWTENVKQAHYIADRLQAGTVWVNCYNVFDAASPFGGYKQSGLGREMGSYALDNYTEVKSVWVNLED

SEQ ID NO: 89 - DNA, 1470 bp, Sinorhizobium meliloti 1021
  CDS (1)..(1470): transl_table=11
atgcaaagttaccaaattcgcgaaatggcgacgccgctctgtcagccggccgcttcacattttatcgacggcacctttattgaggatcgcaccggtcctgagatcctctccgtcaatccggtggatggtgagatcatcgccaaattgcatggggcgacttcctgcatcatcgagaaggcaattgcctcggcgaaacgggcgcagaaagaatgggctcggaaagagccggcggagcggggtcgcgtcctcagtcgcgccgctgacatcatgcgggcgcgaaacagggaactgtcggttctcgaaacgcgcgatacaggcaagccaatttctgaaacactggtggcggacgccgctagcggtgccgattgcctcgagtattttggcgcaatcgcggcgacactttcgggagacagcatccagttcggagaagattgggtctacacacggcgggagccgcttggggtctgtctcggaataggggcctggaactaccccatccagattgcggcctggaaggcagcccccgcgcttgcttgcgggaatgccatgatattcaagccgtcggaagtgaccccattgtcagcgctcaagctcgcggaaattctgactgaagcggggcttcctcctggcgttttcaatattgtgcaaggtgccggtgatgttggggctgagctcgccacccatccggcgatcgccaaagtctccctcaccggctcggtcaagactggcgcgagggtcgcctcggccgccatggccggcatccggccagtaacgatggagcttggtggaaagtctgcgctgatcgtcttcgacgatgcagatgttgaggcagccgtcagcggcgcaattctcgggaatttttattcggccggccagatctgctcaaacggtacgcgcgttttcctgcagcgcggaataagggaagcgttccttgcgcgcttgctggcccgggtcgcggctttgaagattggtgatccgatggacgaggagaccgacatcgggccgctagtcagcgccgcccatcgcaaccgggttgccacatacgtcgcccgcgccgaggttgagggagcataccagatggcgcctccgcgcaagcttccaccaggggatgcctggcacgagcccgtagtcttcacgaatgttacggattggatgacgcttgctcgggaagaagtgttcggtccggtcatggccgtcctggacttcgatgacgagcaagatgtcgtcgcaagagccaatgcaacggacttcggattggcagcaggcatattcacgagagacctcgttcgtgcccataggttggcggctgagctcgaagccggaaccgtgtggatcaacgcttacaacttgacgccagctggcatggcgttcggcggaatcaagagatcaggcatcgggcgcgaaaacgggcgtgtcgcgatcgaccactatacccagctcaagtctgtgttcgtcagcatgcagacataa

SEQ ID NO: 90 - protein, 489 aa, Sinorhizobium meliloti 1021
MQSYQIREMATPLCQPAASHFIDGTFIEDRTGPEILSVNPVDGEIIAKLHGATSCIIEKAIASAKRAQKEWARKEPAERGRVLSRAADIMRARNRELSVLETRDTGKPISETLVADAASGADCLEYFGAIAATLSGDSIQFGEDWVYTRREPLGVCLGIGAWNYPIQIAAWKAAPALACGNAMIFKPSEVTPLSALKLAEILTEAGLPPGVFNIVQGAGDVGAELATHPAIAKVSLTGSVKTGARVASAAMAGIRPVTMELGGKSALIVFDDADVEAAVSGAILGNFYSAGQICSNGTRVFLQRGIREAFLARLLARVAALKIGDPMDEETDIGPLVSAAHRNRVATYVARAEVEGAYQMAPPRKLPPGDAWHEPVVFTNVTDWMTLAREEVFGPVMAVLDFDDEQDVVARANATDFGLAAGIFTRDLVRAHRLAAELEAGTVWINAYNLTPAGMAFGGIKRSGIGRENGRVAIDHYTQLKSVFVSMQT

SEQ ID NO: 91 - DNA, 1503 bp, Brucella melitensis 16M
  CDS (1)..(1503): transl_table=11
ttgccttactgccctattgccttacacaaggaaacaacaatgaaagcacagcccaaagcctcgcacttcattggcggcgcattcgtggaagacaaggcgggcaagccgctgcccgtgatctatccggcaaccggcgaggaaatcgccagtctttattccgcgacgccaggcattatcgaagcggcttacgcagcagcactgaaagcgcaaggcgaatgggcagcattgaaacccgtcgagcgcgggcgcatcctgcgccgcacggcggaaatcctgcgcgagaagaaccggaaattgtcgaagctcgaaacgctggataccggcaaggcgcttcaggaaacgctcgttgcagatgccgcttcggctgccgatgcgctggagtttttcggcggcattatttccggcttcaatggcgagttcgtggagcttggcggctcgtttgcctatacacgccgcgaggcactcggcatctgcgtcggtatcggcgcatggaactatccgatccagatcgcagcgtggaaatcggcaccggcgcttgccatgggcaatgccttcatcttcaaaccatccgaaaacacgccgctttcagcactggcactggcggaagcctataaggaagcggggcttcctgacgggctgttcaatgtcgtgcagggttatggcgatgtgggtgctgcgctcgtcaatcatcgcctgacggcaaaggtttcgctgacgggttccgtgccgaccggcagacgcatcatggcgcaggctggcgaacagctgaaacatgtcaccatggagcttggcggcaagtcgccgctcatcgtcttcgatgacgccgaccttgaaagcgccatcggcggcgcaatgctcggcaatttctattcgaccggtcaggtctgctcgaacggcacccgcgtcttcgttcacaagaatatccgcgaacgtttcatcgagcgccttgtcgagcgcacgcgaaaaatccgtatcggcgatcccttcgatgaagccacgcagatgggtccgctcatcagcgccgcccagcgcgacaaggttctatcctatatcaaaaaaggcaaggcggaaggcgcaacacttgcctgtggcggcggcgtgccgaaattgcagggcttcgataagggcttcttcatcgagccgacggtctttgcagatgttaccgacactatgaccatcgcacgcgaggaaatcttcgggccggtgatgagcgtgctggaattttccgatgaggacgaagtgattgcgcgcgccaatgatagcgaattcggccttgcggcaggcgtcttcactgccgatctttcccgcgggcatcacgtgatcggccagatcaaggccggcacatgctggatcaatgcctataatctgacgcccgtggaagtgcctttcggcggctacaagcaatcgggcatcggccgtgaaaacgggatcgccgcgcttgcccattacagccagatcaagaccgtctatgtggagatgggcaaggtagacagcccctactga

SEQ ID NO: 92 - protein, 500 aa, Brucella melitensis 16M
MPYCPIALHKETTMKAQPKASHFIGGAFVEDKAGKPLPVIYPATGEEIASLYSATPGIIEAAYAAALKAQGEWAALKPVERGRILRRTAEILREKNRKLSKLETLDTGKALQETLVADAASAADALEFFGGIISGFNGEFVELGGSFAYTRREALGICVGIGAWNYPIQIAAWKSAPALAMGNAFIFKPSENTPLSALALAEAYKEAGLPDGLFNVVQGYGDVGAALVNHRLTAKVSLTGSVPTGRRIMAQAGEQLKHVTMELGGKSPLIVFDDADLESAIGGAMLGNFYSTGQVCSNGTRVFVHKNIRERFIERLVERTRKIRIGDPFDEATQMGPLISAAQRDKVLSYIKKGKAEGATLACGGGVPKLQGFDKGFFIEPTVFADVTDTMTIAREEIFGPVMSVLEFSDEDEVIARANDSEFGLAAGVFTADLSRGHHVIGQIKAGTCWINAYNLTPVEVPFGGYKQSGIGRENGIAALAHYSQIKTVYVEMGKVDSPY

SEQ ID NO: 93 - DNA, 1482 bp, Schizosaccharomyces pombe 972h-
  CDS (1)..(1482)
atggcccctcaattcaaacgccctgagctctttggctttgataagtctcatgctcaatcttttgttcaaggaaaatggatttcttctcctaacaacaaaacttttgaggttgataacccagctactggtgaaataatcggtaaagtggccgatgtctcagtagaggaaacaaaaaaagccatcagtgccgctaacgaggccttcaaaacttataaaaattttactcatgtccaacgtagtcagttattggaacgctgggcagagcttattatggagaacaaagacgacttggtcaagatgcttaccttagaaaacggcaagcctttgagccaagctgagatggaggtcaccacatgtagcggatatcttaaatggtatgctgctgaagccgttcgtacctttggcgatgtagctccttccagcttacaaagtcaaaactttctcatctccatcaaacagccagttggtgtcagtgccttgattactccttggaacttccccgccgccatgattgctcgtaaaggtggtgccgctttggctgctggttgtaccgctattttcttgcctgctttccgcactccctacgtttgcttaggtttagtcaggttggcgcaagaggccggtttccctgacggtgtcttaaatgtgatcacttcttctgatgcatctgctcatggtaaagaactgactaccaaccctatcgttcgtaaggtttccttcactggtagtactaatgtcggtaaaattcttatgggacaaagtgccagcacaatcaagaaggtttcaatggagttaggaggtaatgcccctttcattgtattccctgacttccccattgatcaggctgtcgaatctttctgcactatcaagtttaactcttgtggtcaagtttgtgtctgccctaacagagtttacgttcacaagaatgtttacgacgaattcgtcagcaagcttaccgaaaaagtcaagaccattaaagtaggagatggatttgactcttcttctgctgttggccctttgatttctcaagatggatgcaaaaaggtcagcaagcacattgaagatgctgtttcaaagggtgccaaaatcactgttggtggaaaggagatttcctcaagcaaaggttatttttttgaaccaaccgtgctctccggtgtaactcaagacatgttggttgctagcgaggaaacattcggcccactcgcctctgtcttcaagttcgacgacaccgaagaggtgatcgaatgggctaacgacagtgatgttggcttggccggttacgtctttaccaataacttgtccacaatgatccacgttgccaaagaactagaggtgggtcttgtaggtgccaatatcgaaatggttgacgaaccatttatttcctttggcggcatcaaacagagcggttttggcaaggaagccggtcgtttgggcgttcaagaatttatggtggttaaggaaatcaatctcaagactctttaa

SEQ ID NO: 94 - protein, 493 aa, Schizosaccharomyces pombe 972h-
MAPQFKRPELFGFDKSHAQSFVQGKWISSPNNKTFEVDNPATGEIIGKVADVSVEETKKAISAANEAFKTYKNFTHVQRSQLLERWAELIMENKDDLVKMLTLENGKPLSQAEMEVTTCSGYLKWYAAEAVRTFGDVAPSSLQSQNFLISIKQPVGVSALITPWNFPAAMIARKGGAALAAGCTAIFLPAFRTPYVCLGLVRLAQEAGFPDGVLNVITSSDASAHGKELTTNPIVRKVSFTGSTNVGKILMGQSASTIKKVSMELGGNAPFIVFPDFPIDQAVESFCTIKFNSCGQVCVCPNRVYVHKNVYDEFVSKLTEKVKTIKVGDGFDSSSAVGPLISQDGCKKVSKHIEDAVSKGAKITVGGKEISSSKGYFFEPTVLSGVTQDMLVASEETFGPLASVFKFDDTEEVIEWANDSDVGLAGYVFTNNLSTMIHVAKELEVGLVGANIEMVDEPFISFGGIKQSGFGKEAGRLGVQEFMVVKEINLKTL

SEQ ID NO: 95 - DNA, 1497 bp, Schizosaccharomyces pombe 972h-
  CDS (1)..(1497)
atgagtacatcgtcgaaattaagtacaaacatcaaagatctcagtctgtttgatttagaggaatttcccgctcgcagttacatcggtggaaaatgggtaaccgctgcgtcgggaaagacgtttgacgtggaaaacccaggtttgaacgagactctggctccagtgacagatatgtccgtggaggaaacgagaaaagccatcaaagttgcgcacgaagcgtttctctcttacaggaacagcgacatcaaggagcgatatgccattcttcgtcgttggtatgatttgattatggaaaatgcagatgatttggccaccatgatgactttggaaaacggcaaggctttgggagatgccaagggggaagtcgtttatgctgcaaagtttattgactggtttgcaggtgaagctctacgaatctctggtgatagttcaatgtcttccaatccccaaaaccggatcattacgatcaaacaacccgtcggtgtagttggtatcatcactccctggaactttcccgccgccatgataactcgaaaagtgggcgccgctttggccgccggctgtactgtagttattcgcccggccgctgaaacccccttcaccgctttggctctcgccaagttggctgaacgtgctggtgttccagctggagttttaaatatggttactgctaactctcccagcgagcatggaattgagttgaccaccaacccattgatccgcaaagtctccttcaccggctccaccaatgtcggcaaaatcctggcaaagcaatcgtcatccactttaaagaagctttccctcgaacttggtggtaatgctccattcattgtctttgaggacgctgacttggaaaaggctgctgatgctttaatggcatgtaagtttcgtggcagtggacaaacttgtgtgtgtgcaaaccgcatctatgtgcattcctctgtgtacgacgccttcgttgatcttgtcacggaacgtgtctccaaattcaaactgggttacggtttggatgctggcgtcacccacggacctcttattagtgagaaggcaattagcaaggttaagcaacatgttgaggatgctgttcaaaagggcggtgttgtggttaccggtggtaaagtggcttccaacctaggtcctatgtactttgagcccaccgttataattaacgctaaacaaggaatgttaatctcagaggaagaaacatttggtcctgttggcgctttgttcaaatttgacacagaggacgaggtagtcgcctgggctaatgacagcccagttggtttagcaggttatctcttctccaaagacatttctcgcgtcttccgtgttggagaagcattgcaagttggcatggttggttgtaataccggccttgtttccgacgttctttcacctttcggtggagtcaaagaaagtggatttggccgtgaaggcagcaagtacggtatttctgaatatctcgatatcaagtccttaactatctcgaccctctaa

SEQ ID NO: 96 - protein, 498 aa, Schizosaccharomyces pombe 972h-
MSTSSKLSTNIKDLSLFDLEEFPARSYIGGKWVTAASGKTFDVENPGLNETLAPVTDMSVEETRKAIKVAHEAFLSYRNSDIKERYAILRRWYDLIMENADDLATMMTLENGKALGDAKGEVVYAAKFIDWFAGEALRISGDSSMSSNPQNRIITIKQPVGVVGIITPWNFPAAMITRKVGAALAAGCTVVIRPAAETPFTALALAKLAERAGVPAGVLNMVTANSPSEHGIELTTNPLIRKVSFTGSTNVGKILAKQSSSTLKKLSLELGGNAPFIVFEDADLEKAADALMACKFRGSGQTCVCANRIYVHSSVYDAFVDLVTERVSKFKLGYGLDAGVTHGPLISEKAISKVKQHVEDAVQKGGVVVTGGKVASNLGPMYFEPTVIINAKQGMLISEEETFGPVGALFKFDTEDEVVAWANDSPVGLAGYLFSKDISRVFRVGEALQVGMVGCNTGLVSDVLSPFGGVKESGFGREGSKYGISEYLDIKSLTISTL

SEQ ID NO: 97 - DNA, 1491 bp, Schizosaccharomyces pombe 972h-
  CDS (1)..(1491)
atgtcagaagatttatttgtctccattaatttccctaacggaaaatctgtcaaacaacctatagggctgtatattaatggagagtggcacaaatcagctgaaacatgggagaccgttgacccttccattgaggaggtcattgcaaaagtatatcttgctggtgagaaagaaattgactatgcggtgaaatctgctaaggaagcctttaaaacttggaaaaaggttcctggatctgaaaagggtgaactactaatgaagctagccgagttaactgaaaagcatgcggatactttagctgctattgaagctatggactcaggaaaaccacttgtttcaaatgctcgcggagatgtcgatggaacgattgctcttttacgttattgtgccggttgggctgataaaatatatggtcaagtcatacctactggacctgaaaagttagcttatgcgaaaaggactccaattggtgtatgtggtcagatagtcccatggaattatccattgaatatggccggatggaaaattgcacctgcgcttgctgccggaaattgtataatcattaaatctgctgagacaacaccactatcactgctttactttgcaactttagttgaagaagcaggatttcctaaaggtgtcgtgaatatcataagtggtctcggtacagttgcaggttcatatatggccaaacaccctggaattgataaaattgctttcacaggttctactaaagtcggagttattgttcaacaattagcagcctcaaatttaaaagcagtgactctagaatgcggcgggaaatctccctttttggtttttgaggatgccgatttagatcaagctgtaaagtgggcagcccttggaattatgtataacagcggtcagatttgtacttctaattcaaggatttacgttcaagattctgtttacgataaattcatcgagctgtttaaaaagcacgtcattcaagattatattgttggcatgccttttgacgataatactgttgttggaccggttgttaacaaaactcaatataaccgtataaagaattacatagagcaaggtaaaaaagagggcgcaaagcttgtccttggtgatgagcctttacctttaaagcagggatatttcatttcccccacaattttcgctgattgttcggaaaatatgactatcgtgaaggaggaaatttttggaccagttgttgcaatttcgaaatttaaaacggaggatgaggcaattgagaaagccaacaataccacctacggattggccgccatgtgttttacaaaggatttagaacgagcacatcgtgttagcgatgaacttgaagcaggcatggtgtttatcaattcaactgaaaacagtgatatacaagccccttttggaggaataaagatgagtggaataggtaatgaattgggctccaacggtattgagatgtatacacaaattaaagctgttcatattaattttaataacaaactttga

SEQ ID NO: 98 - protein, 496 aa, Schizosaccharomyces pombe 972h-
MSEDLFVSINFPNGKSVKQPIGLYINGEWHKSAETWETVDPSIEEVIAKVYLAGEKEIDYAVKSAKEAFKTWKKVPGSEKGELLMKLAELTEKHADTLAAIEAMDSGKPLVSNARGDVDGTIALLRYCAGWADKIYGQVIPTGPEKLAYAKRTPIGVCGQIVPWNYPLNMAGWKIAPALAAGNCIIIKSAETTPLSLLYFATLVEEAGFPKGVVNIISGLGTVAGSYMAKHPGIDKIAFTGSTKVGVIVQQLAASNLKAVTLECGGKSPFLVFEDADLDQAVKWAALGIMYNSGQICTSNSRIYVQDSVYDKFIELFKKHVIQDYIVGMPFDDNTVVGPVVNKTQYNRIKNYIEQGKKEGAKLVLGDEPLPLKQGYFISPTIFADCSENMTIVKEEIFGPVVAISKFKTEDEAIEKANNTTYGLAAMCFTKDLERAHRVSDELEAGMVFINSTENSDIQAPFGGIKMSGIGNELGSNGIEMYTQIKAVHINFNNKL

SEQ ID NO: 99 - DNA, 1473 bp, Corynebacterium glutamicum ATCC 13032
  CDS (1)..(1473): transl_table=11
atgactattaatgtctccgaactacttgccaaagtccccacgggtctactgattggtgattcctgggtggaagcatccgacggcggtactttcgatgtggaaaacccagcgacgggtgaaacaatcgcaacgctcgcgtctgctacttccgaggatgcactggctgctcttgatgctgcatgcgctgttcaggccgagtgggctaggatgccagcgcgcgagcgttctaatattttacgccgcggttttgagctcgtagcagaacgtgcagaagagttcgccaccctcatgaccttggaaatgggcaagcctttggctgaagctcgcggcgaagtcacctacggcaacgaattcctgcgctggttctctgaggaagcagttcgtctgtatggccgttacggaaccacaccagaaggcaacttgcggatgctgaccgccctcaagccagttggcccgtgcctcctgatcaccccatggaacttcccactagcaatggctacccgcaaggtcgcacctgcgatcgctgcaggttgtgtcatggtgctcaagccagctcgacttaccccgctgacctcccagtattttgctcagaccatgcttgatgccggtcttccagcaggtgtcctcaatgtggtctccggtgcttccgcctctgcgatttccaacccgattatggaagacgatcgccttcgtaaagtctccttcaccggctccaccccagttggccagcagctgctcaaaaaggctgccgataaagttctgcgcacctccatggaacttggtggcaacgcacctttcattgtcttcgaggacgccgacctagatctcgcgatcgaaggtgccatgggtgccaaaatgcgcaacatcggcgaagcttgcaccgcagccaaccgtttcttagtccacgaatccgtcgccgatgaattcggccgtcgcttcgctgcccgccttgaagagcaagtcctaggcaacggcctcgacgaaggcgtcaccgtgggccccctggttgaggaaaaagcacgagacagcgttgcatcgcttgtcgacgccgccgtcgccgaaggtgccaccgtcctcaccggcggcaaggccggcacaggtgcaggctacttctacgaaccaacggtgctcacgggagtttcaacagatgcggctatcctgaacgaagagatcttcggtcccgtcgcaccgatcgtcaccttccaaaccgaggaagaagccctgcgtctagccaactccaccgaatacggactggcctcctatgtgttcacccaggacacctcacgtattttccgcgtctccgatggtctcgagttcggcctagtgggcgtcaattccggtgtcatctctaacgctgctgcaccttttggtggcgtaaaacaatccggaatgggccgcgaaggtggtctcgaaggaatcgaggagtacacctccgtgcagtacatcggtatccgggatccttacgccggctag

SEQ ID NO: 100 - protein, 490 aa, Corynebacterium glutamicum ATCC 13032
MTINVSELLAKVPTGLLIGDSWVEASDGGTFDVENPATGETIATLASATSEDALAALDAACAVQAEWARMPARERSNILRRGFELVAERAEEFATLMTLEMGKPLAEARGEVTYGNEFLRWFSEEAVRLYGRYGTTPEGNLRMLTALKPVGPCLLITPWNFPLAMATRKVAPAIAAGCVMVLKPARLTPLTSQYFAQTMLDAGLPAGVLNVVSGASASAISNPIMEDDRLRKVSFTGSTPVGQQLLKKAADKVLRTSMELGGNAPFIVFEDADLDLAIEGAMGAKMRNIGEACTAANRFLVHESVADEFGRRFAARLEEQVLGNGLDEGVTVGPLVEEKARDSVASLVDAAVAEGATVLTGGKAGTGAGYFYEPTVLTGVSTDAAILNEEIFGPVAPIVTFQTEEEALRLANSTEYGLASYVFTQDTSRIFRVSDGLEFGLVGVNSGVISNAAAPFGGVKQSGMGREGGLEGIEEYTSVQYIGIRDPYAG

SEQ ID NO: 101 - DNA, 1494 bp, Corynebacterium glutamicum ATCC 13032
  CDS (1)..(1494): transl_table=11
atgaatgctgcaaccaggcgtgcttctctgcaactcccctatacccatgtcgatgatttctacatcaacggttcctgggttaaagcagaaggaacacaacgcaaccccgtagttgatcctgcggtcggtcaagaatggggatctgttccagaagcaaccgcatctgaattggactctgcggtgggagctgcacgtacagcgctaaagtcgtggagtgcacttacaggtgcggaacgaacaggctacctcctgaaaatcgcgacggaaattgaatcccgttctgaagctctagcacttactaatacccgcgaaaatggttcccccatttccgagacccgtggagctgcgtccaatgcagcaggaattttccgttactttgccactctcgcgccttggttagacggcgaagacatccgcccatttcctgccggtagcgccgaatccatcgtggataaagatcccatcggtgtctgcgcactcatcgccccatggaatttcccgatcaaccttgtagtcatcaaactggcaccagcacttcttgccggctgtaccgtcatcatcaaaccagcctcccccaccccactgtcgatccgtttcatcatcgaagccatcgaagccgccggagtgccagcaggcgtagtcaacctactcaccggttcagggcgtttcggtgatgcccttgtccgccaccccggagtagacaaggtagcgtttaccggatcaacgcctgttggaaagaagatcgctgccgcctgcggagaactactccgaccagtgactttagagctaggcggaaaatcttccgcgattatccttcctgatgcagacatgtcagtactctcgacgcggttgattcgatcctgtatgcgcaacactggacaaacctgctacatcagtacccggattattgcccctagctcacgctatgcggaagtcgtacaaacagtggcaagcactatcgctgcaggtagacaaggtgacccctatgatgaagaaacggtttttgggccagttgccagcgcctctcagtactcaaccgtcatgtcttacattgactccgcacgagaggaaggtgcacgagtggttgcaggtggaacccggtcaatcagcctttctgaaggtttagaatcaggcgagtttatccaaccaaccgtgtttgccgatgtcacccccgacatgcggatatcacgcgaagaaatcttcggccctgttatttccatcctaaagtacgacgatacaaacggtgtttccgaagcaatcgcactagccaacaacacgaaattcggtctcggtggcttggtatttggtgcggatgaggaacaagcactagaagtcgcccgtcaagtggattctggttccgtaggcatcaacttcttcggttccaaccattccgccccatttggaggacgccacgaatccggtatgggagtggaatacggcatcgaaggcctcagtgcttacctgacatacaagagtattcaccgaaccatttag

SEQ ID NO: 102 - protein, 497 aa, Corynebacterium glutamicum ATCC 13032
MNAATRRASLQLPYTHVDDFYINGSWVKAEGTQRNPVVDPAVGQEWGSVPEATASELDSAVGAARTALKSWSALTGAERTGYLLKIATEIESRSEALALTNTRENGSPISETRGAASNAAGIFRYFATLAPWLDGEDIRPFPAGSAESIVDKDPIGVCALIAPWNFPINLVVIKLAPALLAGCTVIIKPASPTPLSIRFIIEAIEAAGVPAGVVNLLTGSGRFGDALVRHPGVDKVAFTGSTPVGKKIAAACGELLRPVTLELGGKSSAIILPDADMSVLSTRLIRSCMRNTGQTCYISTRIIAPSSRYAEVVQTVASTIAAGRQGDPYDEETVFGPVASASQYSTVMSYIDSAREEGARVVAGGTRSISLSEGLESGEFIQPTVFADVTPDMRISREEIFGPVISILKYDDTNGVSEAIALANNTKFGLGGLVFGADEEQALEVARQVDSGSVGINFFGSNHSAPFGGRHESGMGVEYGIEGLSAYLTYKSIHRTI

SEQ ID NO: 103 - DNA, 1521 bp, Corynebacterium glutamicum ATCC 13032
  CDS (1)..(1521): transl_table=11
atgactgtctacgcaaatccaggaaccgaaggctcgatcgttaactatgaaaagcgctacgagaactacattggtggcaagtgggttccaccggtagagggccagtaccttgagaacatttcacctgtcactggtgaagttttctgtgaggtcgcacgtggcaccgcagcggacgtggagcttgcactggatgctgcacatgcagccgctgatgcgtggggcaagacttctgtcgctgaacgtgctctgatcctgcaccgcattgcggaccgcatggaagagcacctggaagaaatcgcagttgcagaaacctgggagaacggcaaggcagtccgtgagactcttgctgcagatatcccactggcaatcgaccacttccgctactttgctggcgcgatccgtgctcaggaagatcgttcctcacagatcgaccacaacactgttgcttaccacttcaacgagccaatcggtgttgttggtcagatcattccttggaacttcccaatcctcatggctacctggaagctcgcaccggcacttgctgcaggtaacgcgatcgtcatgaagccagctgagcagaccccagcatccattttgtatctgattaacatcatcggcgatctcatcccagagggcgtcctcaacatcgtcaacggactcggcggtgaagcaggcgctgcactgtccggctctaatcggattggcaagattgctttcaccggttccaccgaggtcggcaagctgatcaaccgcgctgcatccgacaagatcattcctgtcaccctggagctcggcggtaagtccccatccatcttcttctccgatgttctgtcacaggatgacgccttcgcagagaaggcagttgaaggcttcgcgatgttcgccctcaatcagggtgaagtttgtacctgtccttcccgtgcacttgttcatgagtccatcgctgatgaattcctcgagcttggcgtgaagcgagttcagaacatcaagctgggtaacccacttgatactgaaaccatgatgggtgctcaggcgtcccaggagcagatggacaagatctcctcctacctgaagatcggcccagaagaaggcgctcaaaccctcactggtggcaaggtcaacaaggttgatggcatggagaacggttactacattgagccaaccgttttccgcggcaccaacgacatgaggatcttccgcgaggaaatcttcggaccagtcctttctgttgctaccttcagcgacttcgatgaggccatccgtattgcaaacgacaccaactacggcctcggcgctggtgtctggagccgtgaccaaaacaccatttatcgtgcaggtcgcgcaatccaggctggtcgagtttgggtcaaccagtaccacaactacccagcgcactccgctttcggtggatacaaggagtccggcatcggccgtgagaaccacctcatgatgctgaaccactaccagcagaccaagaacctgttggtctcctacgatccaaacccaaccggactgttctga

SEQ ID NO: 104 - protein, 506 aa, Corynebacterium glutamicum ATCC 13032
MTVYANPGTEGSIVNYEKRYENYIGGKWVPPVEGQYLENISPVTGEVFCEVARGTAADVELALDAAHAAADAWGKTSVAERALILHRIADRMEEHLEEIAVAETWENGKAVRETLAADIPLAIDHFRYFAGAIRAQEDRSSQIDHNTVAYHFNEPIGVVGQIIPWNFPILMATWKLAPALAAGNAIVMKPAEQTPASILYLINIIGDLIPEGVLNIVNGLGGEAGAALSGSNRIGKIAFTGSTEVGKLINRAASDKIIPVTLELGGKSPSIFFSDVLSQDDAFAEKAVEGFAMFALNQGEVCTCPSRALVHESIADEFLELGVKRVQNIKLGNPLDTETMMGAQASQEQMDKISSYLKIGPEEGAQTLTGGKVNKVDGMENGYYIEPTVFRGTNDMRIFREEIFGPVLSVATFSDFDEAIRIANDTNYGLGAGVWSRDQNTIYRAGRAIQAGRVWVNQYHNYPAHSAFGGYKESGIGRENHLMMLNHYQQTKNLLVSYDPNPTGLF

SEQ ID NO: 105 - DNA, 1536 bp, Streptomyces coelicolor A3(2)
  CDS (1)..(1536): transl_table=11
atgcacaacccgggcaacgccaccccggaccgattcccggcccaggaccgcttcgcggacggggcccagtacatcgcgggccgcctcacgaagggcacctcgggacggacccacaccgtcgtcgacccggccaccggcgaggacgtcctgacctacgacctcgccggacccgacgacgtggacgcggccgtcgccgccgcacgggcggcgttccccggctgggccggtgccacccccggcgagcgctccgacgccctgcaccggttcgccgccgtcctcgccgagcgcgccgaggacttcgcccgcgcggagtccctgcagtgcggcaagccgctgaagctgacccgcgagttcgacgtgccgggcacggtggacaacgccgccttcttcgccggagccgcccggcacctccaggggcagtcggcgggggagtactccggcgaccacacctcgtacgtccgccgcgagcccatcggcgtggtcgggtcgatcgcgccgtggaactacccgctccagatggccgcctggaagatcctcccggcgatcgccgcgggcaacaccatcgtgctcaagcccgccgagatcaccccgctcacctccctgatgttcgcccaggcagcgaccgaggccggtatcccggacggcgtgatcaacgtcgtcagcggcaccggacgggaggccggcgagcacctcgtcgcgcatcccgacgtcgccatgacctccttcaccggctccaccgccgtcggcaagcgcgtcgccgaggtcgccaccgccaccgtcaagcgcctccacctggaactcggcggcaaggcccccttcctcgtcttcgacgacgccgatctcgacgccgccgtccacggcgcggtcgcgggctcgctcatcaacaccggccaggactgcacggccgccacgcgcgcgtacgtgcagcggcccctgtacgaggcgttcgtcgagaagaccgccgccctcatggacaccgtccgcgtcggcgaccccttcgctcccggcaccgacctcggcccgctggtcagccacgtccagcgggaccgcgtcgccgccttcgtcgaccgggcccgctcctacgcgcgcgtggtgaccggcggcgaggtaccgcagggcgacctgaaggacggcgcctactaccggcccaccctcgtggcggacgccgcgcaggacagcgaggtcgtccagtcggagatcttcggcccggtcctggtcgtgctgcccttcgacaccgacgacgagggcatccggctggccaacgacacgccgtacgggctcgccgcctccgcctggagccgggacgtgtaccgcgcgaaccgcgccacccgtgagatcaaggcgggctgcgtgtggatcaacgaccacattccgatcatcagcgagatgccgcacggcggatacaaggcgtccgggttcggcaaggacatgtccgcctactccttcgaggagtacacgcaggtcaagcacgtcatgttcgacaacaccgcggtggcggccaaggactggcaccgcaccgtcttcggggaccggtag

SEQ ID NO: 106 - protein, 511 aa, Streptomyces coelicolor A3(2)
MHNPGNATPDRFPAQDRFADGAQYIAGRLTKGTSGRTHTVVDPATGEDVLTYDLAGPDDVDAAVAAARAAFPGWAGATPGERSDALHRFAAVLAERAEDFARAESLQCGKPLKLTREFDVPGTVDNAAFFAGAARHLQGQSAGEYSGDHTSYVRREPIGVVGSIAPWNYPLQMAAWKILPAIAAGNTIVLKPAEITPLTSLMFAQAATEAGIPDGVINVVSGTGREAGEHLVAHPDVAMTSFTGSTAVGKRVAEVATATVKRLHLELGGKAPFLVFDDADLDAAVHGAVAGSLINTGQDCTAATRAYVQRPLYEAFVEKTAALMDTVRVGDPFAPGTDLGPLVSHVQRDRVAAFVDRARSYARVVTGGEVPQGDLKDGAYYRPTLVADAAQDSEVVQSEIFGPVLVVLPFDTDDEGIRLANDTPYGLAASAWSRDVYRANRATREIKAGCVWINDHIPIISEMPHGGYKASGFGKDMSAYSFEEYTQVKHVMFDNTAVAAKDWHRTVFGDR

SEQ ID NO: 107 - DNA, 1485 bp, Bacillus cereus ATCC 14579
  CDS (1)..(1485): transl_table=11
gtgttaaagacaaatattgagctgaaaccaaaagtggaagcgttcttaaatgaagaaattaaaatgtttattaatggcgaatttgttgctgctattgggggaaagacgtttgaaacgtataatccggctacagaagatgttctagctgtcgtatgtgaagcgcaagaagaggatattgatgctgcagtaaaagcggcaagatctgcatttgaatccggtccgtgggcagaaatgactactgctgaaagagcgcatcttatttataaattagcagatttaattgaagaacatagagaagaattagcgcaactagaagctttagataatggaaagccatatcaagtagcacttgatgatgatatttcagcaactgtagaaaattatcgttattacgcaggatgggctacaaaaattattgggcaaacaatcccaatttcaaaagattacttaaattacacgagacatgaacctgtaggtgttgtaggtcagattattccgtggaattttccgctcgttatgtcttcttggaaaatgggagctgcactggcgacaggttgtacgatcgtattaaagccagcagagcaaacgcctttatctttactatatacagcaaaactttttaaagaggctggatttccaaacggtgttgtaaactttgtaccaggctttggtcctgaagcaggagcagcaattgtaaatcatcatgacattgataaagttgcttttacaggatctactgttacaggaaagtatattatgcgtcagtctgcagaaatgattaagcatgtaacgttagagcttggcggcaaatcaccaaatatcattttagaagatgcggacttggaagaagcaattaatggtgcattccaaggtattatgtataatcacggtcaaaattgtagcgcaggatcacgtgtatttgttcatcgtaaacattatgaaactgtagtagatgcacttgtgaaaatggcgaacaacgtaaaacttggagcaggtatggagaaaggaacggaaatgggtccactcgtatctaagaaacaacaagagcgtgtgttacattacattgagcaagggaagaaagaaggcgctacagttgcggctggtggtgaacgtgcacttgaaaagggttatttcgttaagccaactgtattcacagatgttacagacgatatgacaatcgttaaggaagaaatatttggaccagttgttgttgttctgccatttgattcgacagaagaagtaattgaacgagcgaacaactcatcctatggccttgctgcgggtgtatggacgcaaaatatcaaaacgggtcatcaagtggcaaataaattaaaagcaggaacagtgtggattaatgattataacttagaaaatgcagctgcaccatttggtggatacaaacaatctggtattggccgcgaattaggttcatatgcgcttgataattatacagaagtgaaaagtgtttgggtaaatataaagtaa

SEQ ID NO: 108 - protein, 494 aa, Bacillus cereus ATCC 14579
MLKTNIELKPKVEAFLNEEIKMFINGEFVAAIGGKTFETYNPATEDVLAVVCEAQEEDIDAAVKAARSAFESGPWAEMTTAERAHLIYKLADLIEEHREELAQLEALDNGKPYQVALDDDISATVENYRYYAGWATKIIGQTIPISKDYLNYTRHEPVGVVGQIIPWNFPLVMSSWKMGAALATGCTIVLKPAEQTPLSLLYTAKLFKEAGFPNGVVNFVPGFGPEAGAAIVNHHDIDKVAFTGSTVTGKYIMRQSAEMIKHVTLELGGKSPNIILEDADLEEAINGAFQGIMYNHGQNCSAGSRVFVHRKHYETVVDALVKMANNVKLGAGMEKGTEMGPLVSKKQQERVLHYIEQGKKEGATVAAGGERALEKGYFVKPTVFTDVTDDMTIVKEEIFGPVVVVLPFDSTEEVIERANNSSYGLAAGVWTQNIKTGHQVANKLKAGTVWINDYNLENAAAPFGGYKQSGIGRELGSYALDNYTEVKSVWVNIK

SEQ ID NO: 109 - DNA, 1485 bp, Bacillus cereus ATCC 10987
  CDS (1)..(1485): transl_table=11
atgagtcaactagctgtaaatcttcatgaaaaggtagaaaagtttcttcaaggtacaaaaaagttatatgtgaatggatcctttattgaaagcgcttccggtaaaacatttaacacacctaacccagcaactggcgaaacacttgccgtcgtttctgaagctggtcgcgaagatattcataaagctgtcgttgcagctcgcatggcttttgacgaaggtccttggtctcgcatgagcactgctgagcgaagccggcttatgtacaagttagctgatttaatggaagaacataaagaagagcttgcacagcttgaaacgctagataacggaaagccaatccgtgaaacaatggcagcagacataccactcgcaattgaacatatgcgctattatgccggctgggcgacgaaaatcgttggtcaaacaatccctgtttccggtgattactttaactatacacgccatgaagctgttggtgtcgttggtcaaattatcccttggaacttcccgcttcttatggcaatgtggaaaatgggagcagcgcttgctacaggatgtacaatcgttttaaaacctgcagaacaaactccactatctgccttatacttagctgaattaattgaagaagctggattcccgaaaggtgttattaatatcgttcctggattcggtgaatcagctggacaagctcttgttaatcatccactcgttgataaaattgcatttactggttctactccagtcggtaagcaaattatgcgccaagcatctgaaacattaaagcgcgttacacttgagttaggcggtaaatcaccaaatatcatcttgccagatgctgatttatctcgcgcgattcctggtgcactttctggtgttatgtttaaccaaggacaagtatgctctgctggatcacgtttatttgttccgaagaaaatgtatgataatgtcatggctgaccttgtcctttactctaaaaaattaaatcaaggtgctggcttaagtccagaaactacaatcggccctctcgtttccgaagaacaacaaaaacgtgtaatgggctacatcgaaaaagggattgaagaaggcgctgaagtactttgtggaggaagtaatccattcgatcgaggctacttcgtttctcctacagtattcgctgacgtaaatgatgaaatgacgattgcaaaagaagaaattttcggtccggttatttctgcaataccgtttaacgatattgatgaagtaattgaacgtgcaaataaatcacaatttggcttagcggctggtgtgtggacagaaaatgttaaaacagcacactacgttgcaagtaaagtacgtgctggtacagtatgggtaaactgttataacgtctttgatgcagcatctccatttggaggatttaaacaatccggtcttggtcgtgaaatgggatcttacgcattaaataactatacagaagtgaagagcgtttggcttaacttaaattaa

SEQ ID NO: 110 - protein, 494 aa, Bacillus cereus ATCC 10987
MSQLAVNLHEKVEKFLQGTKKLYVNGSFIESASGKTFNTPNPATGETLAVVSEAGREDIHKAVVAARMAFDEGPWSRMSTAERSRLMYKLADLMEEHKEELAQLETLDNGKPIRETMAADIPLAIEHMRYYAGWATKIVGQTIPVSGDYFNYTRHEAVGVVGQIIPWNFPLLMAMWKMGAALATGCTIVLKPAEQTPLSALYLAELIEEAGFPKGVINIVPGFGESAGQALVNHPLVDKIAFTGSTPVGKQIMRQASETLKRVTLELGGKSPNIILPDADLSRAIPGALSGVMFNQGQVCSAGSRLFVPKKMYDNVMADLVLYSKKLNQGAGLSPETTIGPLVSEEQQKRVMGYIEKGIEEGAEVLCGGSNPFDRGYFVSPTVFADVNDEMTIAKEEIFGPVISAIPFNDIDEVIERANKSQFGLAAGVWTENVKTAHYVASKVRAGTVWVNCYNVFDAASPFGGFKQSGLGREMGSYALNNYTEVKSVWLNLN

SEQ ID NO: 111 - DNA, 1494 bp, Magnaporthe grisea 70-15
  CDS (1)..(1494)
atgaatattcaactttccgcccccaacggcaagaaatggattcaacccacgggtctttttatcaacaatgaattcgtcaagagcagcaatggccagaaattgaccaccgtcaacgctgccaccgaggaggatattacctcggtctattccgccaccgaagaggacattgataaggccgtcaaggccgcacgtgctgctttcaagcacccatcatggaggaacctttccggaactgagcgtggcgagatgatgcacaagcttgctgaccttgttgtcaagaatgctgaaaccttggccaccattgaggctctcgacggcggcaagccctactctgtcgcccttggtgaggacgttgtcgagtttgaaaagaccatacgatattatgctggttttgcagacaagaactttggccagaccatcgacgtcggcccaaacaagtttgcgtacaccatcaaggagcccattggtgtctgcggccagatcattccctggaactatcccctttgtatggccgcctggaagctcggccctgcgcttgcttgcggcaacacggtcgtgctcaagcttgctgaacagactccattgtcgatgctctacgttgcaaccttgatcaaggaggccgggtttcctgcaggcgtagtcaatgttatcaacggccttggcggcgaggctggggcagccattgtgcagcacccagatatcgacaaggttgcctttaccggaagcacagcaactggcaagcaaatcatgaaggcatgcgcaggaacaatgaagaacatcacactcgagacgggcggcaagtcaccactacttgtttttgacgacgccgacctcgacctggccgccgagtggtctcacattggcatcatgagcaaccagggacagatctgtaccgcgacatctcgtattctggtacacgagtccgtctatgacaaattcgtcggtcgtttcaaggacaccgtcgaaaaggtgtcaatagtaggggatccctttgacgaaaagaccttccagggaccacaggtgaccaaggcacagtacgaaaaggtcctgggttatatcaagttggcacaagaagagggtgccaccattgctactggtggcaagccagccccgcaaaacggtaagggtttctacgtcgcccctaccgtgtttaccaacgtcaagacgtcgatgagggtctacaaggaggagatctttggaccatgcgtatccatcatctcgttcaaggacgaggaggaggcggtcgagttggccaacgacaccacctatggtttgggcgccgcagtctttactcgcaacctcaccagggcgcaccgggtcgcccgcgaaatccagtcgggtatggtttggatcaacagcagcaacgactccgactgccgtgttccttttggtggcgtcaagcagtctggtattggtcgcgaattgggtgaggctggccttgcctcttattgcaacatcaagagcgtacacgtgaacatggctgcgcatttgtag

SEQ ID NO: 112 - protein, 497 aa, Magnaporthe grisea 70-15
MNIQLSAPNGKKWIQPTGLFINNEFVKSSNGQKLTTVNAATEEDITSVYSATEEDIDKAVKAARAAFKHPSWRNLSGTERGEMMHKLADLVVKNAETLATIEALDGGKPYSVALGEDVVEFEKTIRYYAGFADKNFGQTIDVGPNKFAYTIKEPIGVCGQIIPWNYPLCMAAWKLGPALACGNTVVLKLAEQTPLSMLYVATLIKEAGFPAGVVNVINGLGGEAGAAIVQHPDIDKVAFTGSTATGKQIMKACAGTMKNITLETGGKSPLLVFDDADLDLAAEWSHIGIMSNQGQICTATSRILVHESVYDKFVGRFKDTVEKVSIVGDPFDEKTFQGPQVTKAQYEKVLGYIKLAQEEGATIATGGKPAPQNGKGFYVAPTVFTNVKTSMRVYKEEIFGPCVSIISFKDEEEAVELANDTTYGLGAAVFTRNLTRAHRVAREIQSGMVWINSSNDSDCRVPFGGVKQSGIGRELGEAGLASYCNIKSVHVNMAAHL

SEQ ID NO: 113 - DNA, 1458 bp, Magnaporthe grisea 70-15
  CDS (1)..(1458)
atggctaccaaaggcagcgagggtttcgccactcatgaattcttcaacatcatcaacggtcagcgccgaggagctggtgcgggcggcgtggaccgcgtcatcgaccctcgcaccgaggagcccttgtgggaggttccaataggatccgcagaggacctcgaagatgctgtcaccgctgctcgcgcggcgcttccaggctgggctgcgaccacggctgaggagagacagcagctgttggccaagatggccgaggctctcggtgcgaacatggagtttcttgctggcgtcgtaatgaaggagacggggaaatcacaactcatggcgactattgagatagcaaactcattagatcagtgcaaatattttgccaacaacactttgcaagacaaggtccagtttgaagacgacaccataaagattatagagacgcatgctccgttaggcgttgtcggagccatatcaccctggaacttcccactgatcctcagcagcatcaaggtggtatctgctctcgtcatgggaaacacagtcatcatgaagccctcccccttcaccccatactgcgtcctcaagttcgccgagctttgccagagcttcctcccaccgggcgtgctccaggccataaacggcggtggagagctcggcgggctcatgacgctgcacgacggcatcgacaagatcagcttcacaggctccatacccacgggcaagaaggtcatggccaactgcgccaagacgctgaagcgcgtcacgctagagctcggcggcaacgacgccgcccttgtgtgcgccaacgtcgacctcgacaaggtcgtggcccagacgtgcgcgggtagcttcttcaacgcgggccagttctgcgcggccaccaagaggatctacgtgcacgccgacatctacgacgcctttgtcgacaagttcgtcgccgagaccaaggcaaactacgagagcgcctttgccggcgacggcgtctcggttccgacaatctttgggcccgtctctaacaagatgcagtttgacgtcgtcaagaggatcctcgacgacgcagcgaggcctgagtccggcggcaagatactcaccggcggtaagccgcacgataagggctattggatccagcccacggtcgtggcgggcccgaaggaggactccatggttgtcaaggacgagcaatttgggccggtgataccgattctgaagtggtccgacgagcaggacgtgatcaagcgcgccaacctctcaaactcgggcctcggagcgacggtctactctaaagatctcacccaggccgagcgcatcgcccggcagcttgagtcagggtctgtatggataaacatgtctgagaagcccaatgctgcggcttggtttggcggatggaaagacagcgggtttggcggagagatgggactcctgggtctatactcttactgtcacatcaagagtatccatttcgccaaatga

SEQ ID NO: 114 - protein, 485 aa, Magnaporthe grisea 70-15
MATKGSEGFATHEFFNIINGQRRGAGAGGVDRVIDPRTEEPLWEVPIGSAEDLEDAVTAARAALPGWAATTAEERQQLLAKMAEALGANMEFLAGVVMKETGKSQLMATIEIANSLDQCKYFANNTLQDKVQFEDDTIKIIETHAPLGVVGAISPWNFPLILSSIKVVSALVMGNTVIMKPSPFTPYCVLKFAELCQSFLPPGVLQAINGGGELGGLMTLHDGIDKISFTGSIPTGKKVMANCAKTLKRVTLELGGNDAALVCANVDLDKVVAQTCAGSFFNAGQFCAATKRIYVHADIYDAFVDKFVAETKANYESAFAGDGVSVPTIFGPVSNKMQFDVVKRILDDAARPESGGKILTGGKPHDKGYWIQPTVVAGPKEDSMVVKDEQFGPVIPILKWSDEQDVIKRANLSNSGLGATVYSKDLTQAERIARQLESGSVWINMSEKPNAAAWFGGWKDSGFGGEMGLLGLYSYCHIKSIHFAK

SEQ ID NO: 115 - DNA, 1491 bp, Magnaporthe grisea 70-15
  CDS (1)..(1491)
atgtctctcgtcacagagctaaagactccggtcacgggcgcttaccagcagcccaccggtgttttcatcaacaacgagtgggtggagggcgtcgacaagaagaccttcgagactatcaaccccagtaccgaggaggttatctgctccgtcagtgaagccaccgagaaggatgttgatattgcagtcaaggctgcccgcaaggcctttgagggcgagtggaagcaaactgctcctggacagcgaagcaagctcttgaccaacctcgccgaacttgtcgagaagaaccttgacctgcttgccgccgttgagtctctcgacaacggaaagtcccttgcgatggccaagggtgacgtcggtgccgtcgccggctgccttaggtactacggtggttgggccgacaagatcgagggcaagaccattgacattgccccggacatgtttcactacacgaggtctgagcctatcggtgtctgcggtcaaattatcccctggaactttcctcttctcatgctggcatggaagctcggacctgccctggccacgggtaacaccatcgtcctgaagaccgccgagcaaacacccctctcagcccttgtcttcgccaacctgatcaaggaggccggtttccccgcaggtgtcgtcaacatcatctctggcttcggcaaggttgccggtgctgccatctccgcacacatggacatcgacaaggttgctttcactggctccaccgtcgttggccgcaccatcatgaaggctgccgcctcgtccaacctcaagaaggtcacccttgagcttggtggcaagtcgcctaacattatcttcaacgacgccgatatcgaggctgccgtcagctgggtcaactttggcatctactacaaccacggccaatgctgctgcgctggttcccgtatctacgttcaggagggcgtctacgacaagttcgttgccgccttcaaggagcgcgccgagaagaacaaggtcggtgacccattcaaggaggacactttccagggtcctcaggtcagcgagctccagttcaaccgcattatggagtacatcaagtcaggaaaggaggagggagctaccgtcgagactggtggtgagaggcacggcgacaagggctacttcatccagcccacgatcttctccaacgtccgcccagagatgaagattatgaaggaggagatctttggccccgtcgtcgccatggccaagttcaagaccgaggaggaggttatcgctcttgccaacgacaccaactacggtctggctgccgccgtccacaccaaggacctcaacacatctatccgtgtcagcaacgccctgaaggccggtaccgtctgggtcaactgctacaacatgctccaccaccagcttccctttggaggtttcaaggagtctggtatcggacgtgagctgggcgaggctgcgctggccaactacacccaaaacaagtcggttgccattcgtcttggcggacccatcttctaa

SEQ ID NO: 116 - protein, 496 aa, Magnaporthe grisea 70-15
MSLVTELKTPVTGAYQQPTGVFINNEWVEGVDKKTFETINPSTEEVICSVSEATEKDVDIAVKAARKAFEGEWKQTAPGQRSKLLTNLAELVEKNLDLLAAVESLDNGKSLAMAKGDVGAVAGCLRYYGGWADKIEGKTIDIAPDMFHYTRSEPIGVCGQIIPWNFPLLMLAWKLGPALATGNTIVLKTAEQTPLSALVFANLIKEAGFPAGVVNIISGFGKVAGAAISAHMDIDKVAFTGSTVVGRTIMKAAASSNLKKVTLELGGKSPNIIFNDADIEAAVSWVNFGIYYNHGQCCCAGSRIYVQEGVYDKFVAAFKERAEKNKVGDPFKEDTFQGPQVSELQFNRIMEYIKSGKEEGATVETGGERHGDKGYFIQPTIFSNVRPEMKIMKEEIFGPVVAMAKFKTEEEVIALANDTNYGLAAAVHTKDLNTSIRVSNALKAGTVWVNCYNMLHHQLPFGGFKESGIGRELGEAALANYTQNKSVAIRLGGPIF

SEQ ID NO: 117 - DNA, 1611 bp, Magnaporthe grisea 70-15
  CDS (1)..(1611)
atgtctgccattcgcatgcacaggaatgcatgctcggcctctcggctcgtggctaggacttcggcccccagacgaacggtgccgtttttgagtcctagctatgctcgtctcgcgtctactcaagtacccaagctcaaagacccatccctcttcaagcaaaacgtctgctatgtcaacggcgcctttgtcccagccaaatcgggtgcgacctttgccgtggctgacccgacgacgggcgagcacatcggcgatgctcccgagttcgatgccgcagacaccgaggccgccatcgccgctgccgagaatgcattcaagacctacagattgaccacgggccgtgagcgctccaagctgctgcggaggtggtatgacctcatgatagccaatgccgatgacatcgcgacacttattacgtgggaaaacggcaagacgatcgccgatgcaaagggtgaggtcacctacgcagccaactttttcgagtggtttagcgaggaggcgcctcgcgtgtacggagacaccattcagccgaccttggcggccaatcgggtcgtcacgaggaaggagcctgtgggagtttgttcgctcatcacgccgtggaacttccccgctgccatgggcacacgtaagatcggtcctgccctcgcggccggctgcaccgtggtctgcaaagcacccgcagaaacgccgttcacatcgctggcgctcgccgagctggcccaccgcgccggggtgcctgcaggcgttgtcaactttgtgacatcacactccaacaccaagacggtcggtgaggtgctttgcacacaccaggcggtgcgcaagataagcttcactggctcgacgggcgtcggcaagacactcatgcagcaggcggcgggcactctgaagaagtgctcattcgaactcggcggcaacgcaccgtttatcgtctttgatgatgctgacctcgacgccgctgtagacggcgccatcgcgtgcaagttcaggtcgagcgggcagacatgtgtctgtgccaacaggatttatgtgcaacgcggcatttacgacgcctttgccgaaaggcttgccaagagggtcaaggaaacgttcaagattggaagtgggttcgaccctgaaactacccacggcccactgattcacgatcgcgccgtgtcaaaggttgcctcgcaggtcgaggatgcggtgggcaagggcgccaagctcctggcgggtggcaagcggctgcccgatttgggcccgcactttttcgctcccacggtcctcggtgatatgacaccggagatgtcgattgcgcgagaggaaactttcggcccaatagcgggtttgttcaaatttgacacggaggccgaggtggtgaagatggccaacgacaccgaagttggcttggcgggctacttcttttcaaaagacatccaccgggcgtaccgcgtggccgaagctctcgaggtgggcatggtgggcgtcaacacgggtatcatcagcgacgtggcgagcccctttggtggcgtcaaggagagtgggttcggcagggagggtagcatgtatggaattcacgagtaccaggtcaccaagaccataacctttgggggcatgggtaaggagctgcaggggtga

SEQ ID NO: 118 - protein, 536 aa, Magnaporthe grisea 70-15
MSAIRMHRNACSASRLVARTSAPRRTVPFLSPSYARLASTQVPKLKDPSLFKQNVCYVNGAFVPAKSGATFAVADPTTGEHIGDAPEFDAADTEAAIAAAENAFKTYRLTTGRERSKLLRRWYDLMIANADDIATLITWENGKTIADAKGEVTYAANFFEWFSEEAPRVYGDTIQPTLAANRVVTRKEPVGVCSLITPWNFPAAMGTRKIGPALAAGCTVVCKAPAETPFTSLALAELAHRAGVPAGVVNFVTSHSNTKTVGEVLCTHQAVRKISFTGSTGVGKTLMQQAAGTLKKCSFELGGNAPFIVFDDADLDAAVDGAIACKFRSSGQTCVCANRIYVQRGIYDAFAERLAKRVKETFKIGSGFDPETTHGPLIHDRAVSKVASQVEDAVGKGAKLLAGGKRLPDLGPHFFAPTVLGDMTPEMSIAREETFGPIAGLFKFDTEAEVVKMANDTEVGLAGYFFSKDIHRAYRVAEALEVGMVGVNTGIISDVASPFGGVKESGFGREGSMYGIHEYQVTKTITFGGMGKELQG

SEQ ID NO: 119 - DNA, 1632 bp, Magnaporthe grisea 70-15
  CDS (1)..(1632)
atggcttcttctcagtcaggcagcgccgcccgtcggctgcaggccaccgcccagcagctgcggcccattgcgtcggcagccatggcgagcaccccgaccaactacccgacgacgcacgaaaagatcactgagcccgttgacaccccttacttcatcgacaacaagtttatcgcctcagaggccacatcctttatcgacctgcacgacccggccaccaacaacctggtgacgcgggtgcctcagatgacggacgccgagctaaaggctgccgtagcctcggctgagaaggccttccctgcatggcgtgcaaccagcgttcttgcccgtcagcagatcatgttcaagtttgttgcactcatccgcgagaactgggacaggctggccgccagcatcacgctcgagcagggcaagacctttgccgacgccaagggtgacgtccttcgtggtctgcaggttgctgaggcagcctgtgctgcccctgagttgctcaagggcgaggttctcgaagtcgccaaggacatggagacaaggacgtaccgtgagcccttgggagttgttgctgctatctgcccatttaacttccctgcaatgattccactgtggtgcattcccattgccaccataactggaaacaccctgatcctcaagccctcggagcgtgaccctggcgcggccatgatcctggcagagctatgccagaaggctggcttccctgatggtgttgtcaacatcgttcatggcgctcacaacacagtaaacttcattcttgacgacccagccattaaggcaatttcctttgtcggtggcaacaaggccggcgagtacatcttcagccgcggcagcgccaacggcaagcgtgtacaagccaacctgggtgccaagaaccacgctgctgtgctccccgactgcaacaagaaccagttcctaaacgccatagttggagctgcttttggagctgctggccagcgctgcatggcgctcagcacgctggttatggttggtgagacgaaggagtggctgccggagcttgcggagctggccaagggattgagtgtcaacggcggtttcgaagaggccgctgatctcggtcccgttatcagcccacagagcaaggagcgtatcgagtccctgatcgccagtgccgagaaggagggtgccaagatcctgctcgacggcagaggcttcgcgccgtcaaagtaccccaacggcaactgggttggacctaccatcatcacagacgtgaccaaggacatggagtgctacaagcaggagatcttcgggccagtacttgtctgcctgaacgtcgagaccctggacgatgccgtcgagctgatcaacagcaacgagtacggcaacggtgttgccatcttcacgcgctccggcgccacggccgaaaagttccgccgcaacatcgaggccggccaggtcggcatcaacgtgcccatccccgtgcccctgcccatgttctcattcaccggcaacaagaagagtgtggcgggcggtggcgcaagcacgttttacggaaagccgggaatcaacttttacacgcagctcaagactgtcactgctttgtggcagtcggccgatgctatttccaagaaggcagatgtcgccatgcccacgcatagctga

SEQ ID NO: 120 - protein, 543 aa, Magnaporthe grisea 70-15
MASSQSGSAARRLQATAQQLRPIASAAMASTPTNYPTTHEKITEPVDTPYFIDNKFIASEATSFIDLHDPATNNLVTRVPQMTDAELKAAVASAEKAFPAWRATSVLARQQIMFKFVALIRENWDRLAASITLEQGKTFADAKGDVLRGLQVAEAACAAPELLKGEVLEVAKDMETRTYREPLGVVAAICPFNFPAMIPLWCIPIATITGNTLILKPSERDPGAAMILAELCQKAGFPDGVVNIVHGAHNTVNFILDDPAIKAISFVGGNKAGEYIFSRGSANGKRVQANLGAKNHAAVLPDCNKNQFLNAIVGAAFGAAGQRCMALSTLVMVGETKEWLPELAELAKGLSVNGGFEEAADLGPVISPQSKERIESLIASAEKEGAKILLDGRGFAPSKYPNGNWVGPTIITDVTKDMECYKQEIFGPVLVCLNVETLDDAVELINSNEYGNGVAIFTRSGATAEKFRRNIEAGQVGINVPIPVPLPMFSFTGNKKSVAGGGASTFYGKPGINFYTQLKTVTALWQSADAISKKADVAMPTHS

SEQ ID NO: 121 - DNA, 1506 bp, Magnaporthe grisea 70-15
  CDS (1)..(1506)
atggcatcggcacccgagaaggaccggcacacctttttcgccggcaaggtgcagccgagtccggacagcccgggcacctttaccaccgtcaacccggcgaccgcccagccgatcgccacgatccacacctcgtcgcgagcctcggtcgacgccgccgtcgatgccgcccgcgccgcgttccccgcctggtcgagcactcccgccccggagcgggcgcagatcctgcagcgcgccgtcgccatcctccgcgagcgcaacgacgccctcgcccgcgtcgagaccctagacaccggcaaggccttctccgaaacccaggccgtcgacgtcgtcacgggcgccgacgtcctcgcctactacgccaacctggtcgcgtcggacggcctcaacggcgagtcgttccgcctcaggcccggcgcatgggtctacagcagcaaggagccgctgggcgcgtgcgcagccatcggcgcctggaactaccccatccagatcgcgctgtggaagtcggcgccctgcctggctgccggcaacacgttggtctacaagccgagcgagtacactcctctgcacgcccagtacctcgctgacatttatgccgaggcgggtgtgccgcccggcgttttcaacgtggtctacggcgccggcgatgtcggcgcccagctgtcgtcgcaccccaagatcgccaaggtcagcttcacgggccaggtcagcacgggtcgcaaggtcgcgggcacggcggcgggcgggctcaagtcggtgactatggagctgggcggcaagagcgcgctcgtggtgctgcccgacgccgacgtctcgcaggccgccgacggggcgatgatggccaacttttacagctcgggtcaggtctgcaccaacggcacgagggtgtttgtgcccagggcgctcaaggaggagtttgagcgcgccgtgctggaaaagattgtgcacgtcagggcgggtgacctgtttgacgcaaacaccaactttggcccgctgagcagcaaggtgcactacgaaaaggtggtgagctatgtgaggcatggcatcgagcaggacaaggccaggttgttgtgcggcggcatcggccagccgcgtggcgtgcccaaggagctcggcaaggggttctggatcgagccgacggtctttacggattgcacggatgacatgcgcattgtcaaggaggagatcttcggaccggtcatgtcgattctcacctatgacacgttggaggaagtcgtccagcgagccaacgcgaccgagctgggcttggccgcgggcgtgtttggcaaggacctgaaccagtgccaccaggtcatcgcgcagctcgaggcgggcatcacatggatcaacacctggggcgagtcgccggccgagatggctgtcggtgggtggaagcagagtggcattggtgtcgagaacggccacaagggcttggacgcatgggttcagaacaagagcacgttggtggaaatgggaggtgcggtgccgaccgtgtttgcaaagatatga

SEQ ID NO: 122 - protein, 501 aa, Magnaporthe grisea 70-15
MASAPEKDRHTFFAGKVQPSPDSPGTFTTVNPATAQPIATIHTSSRASVDAAVDAARAAFPAWSSTPAPERAQILQRAVAILRERNDALARVETLDTGKAFSETQAVDVVTGADVLAYYANLVASDGLNGESFRLRPGAWVYSSKEPLGACAAIGAWNYPIQIALWKSAPCLAAGNTLVYKPSEYTPLHAQYLADIYAEAGVPPGVFNVVYGAGDVGAQLSSHPKIAKVSFTGQVSTGRKVAGTAAGGLKSVTMELGGKSALVVLPDADVSQAADGAMMANFYSSGQVCTNGTRVFVPRALKEEFERAVLEKIVHVRAGDLFDANTNFGPLSSKVHYEKVVSYVRHGIEQDKARLLCGGIGQPRGVPKELGKGFWIEPTVFTDCTDDMRIVKEEIFGPVMSILTYDTLEEVVQRANATELGLAAGVFGKDLNQCHQVIAQLEAGITWINTWGESPAEMAVGGWKQSGIGVENGHKGLDAWVQNKSTLVEMGGAVPTVFAKI

SEQ ID NO: 123 - DNA, 1599 bp, Magnaporthe grisea 70-15
  CDS (1)..(1599)
atgtctcacacagagcccggtcagaaaaccgccgacgcacacctactttgggtagccggcaaggaaaagatcggaggcggcgatatcctgccaattgaaaatcccgcaaccggcgagatctttgcacactgccatactgcatccgcccaagatgtcgatcagtgtatcgaacaggccaatgatgccttcattgccggcacgtggtccaaggctcctcgccattttcgcgccgatgtccttgaccaagccgctaccttgctctccgaacagctatcggagctgatagacctcgaggttttgcagacggggagggccgtccgcgaaatgaaggcacaggtgccgagccttgtcaagtggtttcggtactacgcagctcgactgcgggttgacgaacgtcatgttctcccgaccaccgggtctctgcataactgggtcgaccgcgtcccattaggtgtttgcgcgctgatcactccattcaatcatccgcttttgattgctgtcaagaaggtggccccggcattggccgccggaaacagtgttgtcctcaagccatcagaactaacaccaatcacgtccctacagcttggcaggattctcagagatgctggacttccggagggtgtcttttctgtcttgcctggcctgggggtcgagactggcaagcaactcgtctcacatcgcctggtccgtaaggttgacgttaccggttcaaccgcagcgggtcgcgcaattggggccatcgcaggtggaaatctggctcgtttcaatgctgagctaggtggcaaggcgcccctagtggttttcgagacttctgatctggatgccgccgtcaacggaattgtgtttggagctttcgttgccagcgggcagacttgtgtcgcggtcacgcgcgtgcttgttcacaaatcgatattgggggcgctcaccgagaagctctcggagaagtgcaactccatcgttcgccgtattggtgacccgaaaaacccgctgtcaatgatgggccctctcatctcatcgaagcagctttcgggagtccagcgtcttgtcgatgctgcagtcgccagcggaaatgccagactgctttgtggtggccagcggatgtcgggggtgagccctttggacggtttcgacctttccaagggctacttcttcccaccgaccgtcctgtgtggtactaacccggacggctcgaatgtttgtgcgacagatctgtggtacgaggaggcgttcgggccggtggttgttgtggcgagcttccaggacgaggggcatgctgttcggttggctaacgacacttcattcgggttgggggccggaatatggacgagagatctttcgcaggcgttccgagttagtgagcagattgaggccggtattgtctgggtcaatacgcaccaccgcaacgatccaagcagcccatggggtgcacatggcacgaggtctgacagtggtctcggcactgagaacggtgctgaggcctacatggcatacaccgcaccgaaaagcgtcgttatcaactatgcttcgacggagactgctttgagagaagaggactggtttcgggaggatcaaagtggcggagcagtgcgctatggatga

SEQ ID NO: 124 - protein, 532 aa, Magnaporthe grisea 70-15
MSHTEPGQKTADAHLLWVAGKEKIGGGDILPIENPATGEIFAHCHTASAQDVDQCIEQANDAFIAGTWSKAPRHFRADVLDQAATLLSEQLSELIDLEVLQTGRAVREMKAQVPSLVKWFRYYAARLRVDERHVLPTTGSLHNWVDRVPLGVCALITPFNHPLLIAVKKVAPALAAGNSVVLKPSELTPITSLQLGRILRDAGLPEGVFSVLPGLGVETGKQLVSHRLVRKVDVTGSTAAGRAIGAIAGGNLARFNAELGGKAPLVVFETSDLDAAVNGIVFGAFVASGQTCVAVTRVLVHKSILGALTEKLSEKCNSIVRRIGDPKNPLSMMGPLISSKQLSGVQRLVDAAVASGNARLLCGGQRMSGVSPLDGFDLSKGYFFPPTVLCGTNPDGSNVCATDLWYEEAFGPVVVVASFQDEGHAVRLANDTSFGLGAGIWTRDLSQAFRVSEQIEAGIVWVNTHHRNDPSSPWGAHGTRSDSGLGTENGAEAYMAYTAPKSVVINYASTETALREEDWFREDQSGGAVRYG

SEQ ID NO: 125 - DNA, 1440 bp, Magnaporthe grisea 70-15
  CDS (1)..(1440)
atgggaggagaaaaggactttatagtgccgctcgtgatcggcggcaaggaaaagaccaccagcgactctttcccagtcgtttctcctgcgaccggcgagactgttcataaatgcagcaatgcgaacgtggccgacgccgaggaggccgtcgaggccgcggctgccgctctcaatgactggaagcgcaagaccccggccgagaggcgtgacatattcctcaaggcagcccaaatcctcgttcagcgcacggatgagctcgcgagctacatggagagcgagacggccgcatctagaaattgggccaacttcaaccttgacctcacccgcgagatgctcatcgatgtcgccgggcgcatctcggctgccacgacaggcgccatcccagccacccgggacgccaatcttagtgctatggtggtcaaggaaccctacggtgtcgtcctggccatggctccctggaatgccccttacatcctgggcatgcgggcggtcctgttccctcttgccgtcggcaacacggtcgtcttcaaagggtccgagctgagcccccgtaccatgtggggaatctgctccgtcctcgccgaggctggagtcccccatggtgcgctgagcttgatattttgcagcagggagacggcagcctcggtgaccgagaccctcatcgcccacaagcacatgaagaagatcaactttaccggcagcacgtcggtcgggcgcatcatcggccgcctgtcgggccagcacctcaagcccgtcctgctcgagctcggcggcaaggcgccggccatcgtgtgggaggacgcggacctcgacaacgcggcggcgcagtgcaccctcggtgcgtaccttgcggcgggccaggtctgcatgagcacggagcgcatcattgtgcacaaggctgtctcggagcagttccgcggcaagtttgcggcatgcgtcgacaagttcttcccgtccagcgcggacgcgcccatcctggtccagtcgcagggagtcacgaggaaccacgagcttctcaaggacgctctctccaagggcgccgaggtcgtggtcggcgacgctgaggccaaggaagccaacgcccactccatgcggcccgtggccatcagcggcgtgaccccagacatggacatctacatgaccgagagcttcgggccgacggtgtcgctcatcgaggtcagcagcgaggaggaggcactgaggattgccaacgacaccgagtacggcctctcgtccgccgtcttcaccgcggatctgcgccgggcattacggctggcacatggcatcgagacgggagccgtccacatcaacagcatgagcgtgcacgacgagaccggcctgccccacggcggcgcaaaggccagcggtttcgggcggttcaataccgccgacgggctgaacgagtggttgcggaccaagaacatcacctatcggatttga

SEQ ID NO: 126 - protein, 479 aa, Magnaporthe grisea 70-15
MGGEKDFIVPLVIGGKEKTTSDSFPVVSPATGETVHKCSNANVADAEEAVEAAAAALNDWKRKTPAERRDIFLKAAQILVQRTDELASYMESETAASRNWANFNLDLTREMLIDVAGRISAATTGAIPATRDANLSAMVVKEPYGVVLAMAPWNAPYILGMRAVLFPLAVGNTVVFKGSELSPRTMWGICSVLAEAGVPHGALSLIFCSRETAASVTETLIAHKHMKKINFTGSTSVGRIIGRLSGQHLKPVLLELGGKAPAIVWEDADLDNAAAQCTLGAYLAAGQVCMSTERIIVHKAVSEQFRGKFAACVDKFFPSSADAPILVQSQGVTRNHELLKDALSKGAEVVVGDAEAKEANAHSMRPVAISGVTPDMDIYMTESFGPTVSLIEVSSEEEALRIANDTEYGLSSAVFTADLRRALRLAHGIETGAVHINSMSVHDETGLPHGGAKASGFGRFNTADGLNEWLRTKNITYRI

SEQ ID NO: 127 - DNA, 1509 bp, Gibberella zeae PH-1
  CDS (1)..(1509)
atgtctcccccctcaatccccctcattgcccccaacggcgtaaaatggtctcaaccaacaggcctcttcatcaacaacgaattcgtctcatcatccagttcccgaaccctcacctccatcgaccccgccacagaaaatgaaatcgctaccgtccaagcagcagacgctcaagacatcgacaaagccgtcaaggccgccaaagcagccctgcgccacccctcatggaaagacctccctgcctcagacagaggccaactgatggcccgtctcgcagaccttattgaggctaagcgagaactctttgctactattgatgcgtgggataatggaaagacgtacatcgagactctcgagaatgatctcgttgaggccgttggtgttatccgttattactccggctgggctgataaaacgtttggccaaactatcaacacgacgcctcaaaagtttgcatacaccattcgtcagcccatcggcgttatcgcacagattattccctggaattatcctctttctatggctacgtggaaactcggtccagcactagcttgcggaaacgcagtcgtcatcaaagcagccgagcaaacacctctaagtcttttagtcctgggcgaactcatcaaagaagctggtttcccgccgggcgtcgtcaacatcgtcaacggtctcggcaaagacacaggcgcagccctggtccaacatcctctggtggacaagatcgcattcacagggtccacagccacagctgccaacatcatgggcgtagcagcaaagacactcaagaacatcaccctcgagaccggcggaaagtcgcctttgatcgtgtttgacgacgcggagatggatcaggcggttaaatggtcgcacttcggcatcatgtccaaccaggggcagatctgcaccgcgacatcgcgcattctcgtgcaagagactatttatgaagaattcatcaaaaagttcattgatacgctcaacacggtcagcaaagtaggtgaccagtgggacaagacaacgtaccagggcccgcaggtatcaaaggtgcaatacgagcgaatcctggagtacatcgagattggcaagaaagaaggcgcaacactcgcagcaggcggcggtcccctcaagatcaacggctcagacaaaggattctacatttcccccacagtctttaccgacgtgaagccctccatgcgtgtcttccgtgaagagatcttcggaccagtggtcgtggtttctacctttaaaacagaggaggaagctattgagttggcgaatgatacgacatatggtctaggtgctgcggcgtttacgaccaaccttgaaaaagcgcatcgagtcgctgcggcgattgaggcgggaatggtctggattaatagtagtcaggattgtgatcctagggtgccgtttggaggtgtgaagcagagtggaattgggagggagcttggtgaggcgggattggaggcgtatacgcagattaagagtgtgcatataaatatgggaaataggctgtag

SEQ ID NO: 128 - protein, 502 aa, Gibberella zeae PH-1
MSPPSIPLIAPNGVKWSQPTGLFINNEFVSSSSSRTLTSIDPATENEIATVQAADAQDIDKAVKAAKAALRHPSWKDLPASDRGQLMARLADLIEAKRELFATIDAWDNGKTYIETLENDLVEAVGVIRYYSGWADKTFGQTINTTPQKFAYTIRQPIGVIAQIIPWNYPLSMATWKLGPALACGNAVVIKAAEQTPLSLLVLGELIKEAGFPPGVVNIVNGLGKDTGAALVQHPLVDKIAFTGSTATAANIMGVAAKTLKNITLETGGKSPLIVFDDAEMDQAVKWSHFGIMSNQGQICTATSRILVQETIYEEFIKKFIDTLNTVSKVGDQWDKTTYQGPQVSKVQYERILEYIEIGKKEGATLAAGGGPLKINGSDKGFYISPTVFTDVKPSMRVFREEIFGPVVVVSTFKTEEEAIELANDTTYGLGAAAFTTNLEKAHRVAAAIEAGMVWINSSQDCDPRVPFGGVKQSGIGRELGEAGLEAYTQIKSVHINMGNRL

SEQ ID NO: 129 - DNA, 1434 bp, Gibberella zeae PH-1
  CDS (1)..(1434)
atgtcggccaaactccacaccgtgcctttcctcatcaacggcagtgaccatgtcagcgaaaccaccgccgatgttgtttctcccgtaaacggcgaggttactcaccgttacagcagcgccgacgtcaaggatgccaactctgcagtagatgctgctgctgaggctttcaagtcgtggcgcaagacaagaccttcggagcgtcgcgatctcctcctcaaggttgctgagatcatggaaaggcggcaagaggagctgcgcgggtacgccatgacagagtgcggcagtgatgctgcatgggccagctttgatgtcaacactggtatcagccacatcaaggaaattgctggtcgtgtaggaacaattgagggttcaattcccactgtcgcggatcccaacacaaccgctctcgtcttgagagagccatatggtgtcgttgtagccattgccccttggaatgctccgtatatcctaggcacaagatccgttctcttccctattgctgctggaaacacagttgttttcaaggctagcgagacttgccctcgaacattttgggcaattggcgacatcttcagggaggcagggttccccgatggtgttctcaacgttatctaccatgagcgagccaacgctgcatctgtcacgacagccctaattgagcaccctcaagtcaagaagatcaacttcaccggtagcaccccagttggtcggctcattggcaagattgcaggtgagaacctaaagcctgttatcctagagctgggtggcaaggctcccgccattgtctgggaggatgccgaccttgacctcgccgctctgcagtgcacgctcggagccttcatcaactctggccaagtctgcatgtccacagagagaatcttggtgcacaagaacatcaaggacgagttcgagaagaagctttcagctactatcgaccaggtcttctcatccgcagccgacgctcctatccttgttgcatcagcgccagttgagaagaacaaggcattgattaaggatgccatcgccaagggtgcttccttggctcatggcgacgtcgatgctaaggaggtcagcaacactcgtatgcgaccgattgttgtcagagatgtcaccgccgagatggacatctacaagacagagtcatttggccctactgtctctcttatctctatcgagactgaggaggaggccatcaagatcgccaacgacacagagtacggtctgagctctgctgtgtttacctctgaccttcagcgaggtcttcgcattgcccgcgagatcgagtcaggtgcggttcatatcaacaacatgagcgttcacgacgagagtggtttgcctcatggaggagccaagtcgagtggatacggccgctttggcacgtctgctggtcttgaggagtggactcgaacaaagaacatcacgttcaaaaactaa

SEQ ID NO: 130 - protein, 477 aa, Gibberella zeae PH-1
MSAKLHTVPFLINGSDHVSETTADVVSPVNGEVTHRYSSADVKDANSAVDAAAEAFKSWRKTRPSERRDLLLKVAEIMERRQEELRGYAMTECGSDAAWASFDVNTGISHIKEIAGRVGTIEGSIPTVADPNTTALVLREPYGVVVAIAPWNAPYILGTRSVLFPIAAGNTVVFKASETCPRTFWAIGDIFREAGFPDGVLNVIYHERANAASVTTALIEHPQVKKINFTGSTPVGRLIGKIAGENLKPVILELGGKAPAIVWEDADLDLAALQCTLGAFINSGQVCMSTERILVHKNIKDEFEKKLSATIDQVFSSAADAPILVASAPVEKNKALIKDAIAKGASLAHGDVDAKEVSNTRMRPIVVRDVTAEMDIYKTESFGPTVSLISIETEEEAIKIANDTEYGLSSAVFTSDLQRGLRIAREIESGAVHINNMSVHDESGLPHGGAKSSGYGRFGTSAGLEEWTRTKNITFKN

SEQ ID NO: 131 - DNA, 1479 bp, Gibberella zeae PH-1
  CDS (1)..(1479)
atggctctcaccgtcgagctgtccactcccgttactggtacctaccagcagcccattggcctcttcatcgacggcaagtgggttgagggtgtcgacaagggaaagttcgaggttatcaacccctccaccgaggaggtcatcacctccgtctgtgagggtaccgagaaggatatcgacctagctgtcgccgctgcccgcaaggctttcgatggcgagtggaagaacactgctccccagacccgaggaaaccttctcctcaagctcgccgacctcgccgagaagaacctcgacctcctcgccgccgttgagtctcttgataacggaaagtccatcaccaacgcccgtggtgatgtcggtgccgttgttggctgcctacgatactacggtggttgggccgacaagatcgagggcaagaccattgatattgctcccgatatgttccactacacccgatccgagcccatcggtgtctgcggtcagattatcccctggaacttcccccttctcatgctggcatggaagatcggacctgctctggccactggtaacaccgtcgtcatgaagactgctgagcagactcctctctccgctctcgtcttcactcagttcattgagcaggctggtttccctgctggtgtcttcaaccttgtctctggttacggcaagactgccggtgccgccctctcttctcacatggacgttgacaagatcgccttcactggttctaccgtcattggccgacagatcatgaaggctgctgcttcttccaacctcaagaaggtcaccctcgagcttggtggcaagtcccccaacatcgtcttcgaggatgccgacatcgaggaggccatcaactgggtcaactttggtatctactacaaccacggccagtgctgctgtgctggtacccgtatctttgtccaggagtccatctacgacaagttcctcgctgccttcaagaagcgagctgaggagaacaaggtcggtgaccccttcaacgaggagaccttccagggtccccaggtctctcagctccagtacgaccgtatcatgggctacatcaaggccggtaaggacgagggtgccaccgtcgagatcggtggtgagcgtctcggtgacaagggttacttcatcaagcccaccatcttctccaacgtccgccccgacatgaagatcatgcaggaggagattttcggccccgtctgcgctatttccaagttcaaggacgaggctgaggtcattgaccttgcccacgacaccgcttacggtctcgctgccgctgtccacaccaagaacctcaacactgccctccgcgtttccaacgctctcaaggccggaactgtctgggtgaactgctataacatgctacatcaccagctcccattcggaggctacaaggagagtggaattggacgagaactcggcgaggcagccctcgccaactacacacagaacaagtcggttgccatcaagctgtactaa

SEQ ID NO: 132 - protein, 492 aa, Gibberella zeae PH-1
MALTVELSTPVTGTYQQPIGLFIDGKWVEGVDKGKFEVINPSTEEVITSVCEGTEKDIDLAVAAARKAFDGEWKNTAPQTRGNLLLKLADLAEKNLDLLAAVESLDNGKSITNARGDVGAVVGCLRYYGGWADKIEGKTIDIAPDMFHYTRSEPIGVCGQIIPWNFPLLMLAWKIGPALATGNTVVMKTAEQTPLSALVFTQFIEQAGFPAGVFNLVSGYGKTAGAALSSHMDVDKIAFTGSTVIGRQIMKAAASSNLKKVTLELGGKSPNIVFEDADIEEAINWVNFGIYYNHGQCCCAGTRIFVQESIYDKFLAAFKKRAEENKVGDPFNEETFQGPQVSQLQYDRIMGYIKAGKDEGATVEIGGERLGDKGYFIKPTIFSNVRPDMKIMQEEIFGPVCAISKFKDEAEVIDLAHDTAYGLAAAVHTKNLNTALRVSNALKAGTVWVNCYNMLHHQLPFGGYKESGIGRELGEAALANYTQNKSVAIKLY

SEQ ID NO: 133 - DNA, 1485 bp, Gibberella zeae PH-1
  CDS (1)..(1485)
atgacttcttcagtgacgttgcaaggtgcgcagggtcgtcagattaccgtccaaaccggtctctttatcgacaatgaatttgtaccggcaagcaataatgccacattggatgtggagaatccaaatactgccactatcattgctcaggtctcggcagcacaggcttcagacgttgatcgggcagtccggtcgtcccaaaaggcgtttgcgacatggggacgcagcgatcctggtaccaggagaacactcctgctcaagctggccgatctcgtggaggctcatggccccgagttggcatcgctcgaagcgatcgagggtggcctattatatcgggattctctgggcctccatgtgacgcagtcagtagacaacctacgctatttcgccggctgggcagataagctggacggcgtcagcttgccgatcccctctggggtcgcctatacgcgcagggagcctatcggtgtctgcgctgccattgtgccttggaactcactcatgatcctgttctggaaactagcaccggctattgcagctggtaacaccatcgtcatcaagacggccgaattgaccccgttatgggctcagaaggctgcagagctgatcaaagaggccgggtttcccccgggtgtaatcaacattatctgcggactggggcgcgaagccggtcaagctctcgctgagcacccagtggtccgaaagatcgccttcactggaagctcggtcacggggcgccagatcatgcagtccgctgcccgttcgaacctgaagaaggtctctctggagctgggcggcaagggtccaagcatcgtattcgctgatgccgactgggagaacgctcttttgtggacgaccatgggtattacggcgagcaatgggcagatctgtgccgcagggagccgcatctacgtgcaggacaccatatacgagaagttcatccaggagttcagtcgccgaagccgtgatgccgtgcacggggatccgctcctcgacgagacgaccaagggcgcagtggccagcaaggcgcagctcgacaagatcctgtcatacgtaggaaaggccaaacagaccaaagcaaggcttctgcatggcggacaacccctccctggcaagggtcacttcatggccaacacggccttcgttgatgtcgatcaggacgacaccatcatgcgtgaggagatcttcgggccgtttgcgagcatcgctccgttcagcaccgaggatgaggtcatccgcaaggccaacgactccgatctgggcctcaactctgccgtcttcaccaacgacgtgagccgtgcgttccgtattagcgaagccattgagaccggcacggtcacggtcaactgctgggctatgcttaacgccaacacgccctttggcggagtgaaggagagcgggttcgggcgcgactcgggccaagaagctttggacaactggacggttaccaagactgtcaagttcaatatcttgccaccaaagctgtaa

SEQ ID NO: 134 - protein, 494 aa, Gibberella zeae PH-1
MTSSVTLQGAQGRQITVQTGLFIDNEFVPASNNATLDVENPNTATIIAQVSAAQASDVDRAVRSSQKAFATWGRSDPGTRRTLLLKLADLVEAHGPELASLEAIEGGLLYRDSLGLHVTQSVDNLRYFAGWADKLDGVSLPIPSGVAYTRREPIGVCAAIVPWNSLMILFWKLAPAIAAGNTIVIKTAELTPLWAQKAAELIKEAGFPPGVINIICGLGREAGQALAEHPVVRKIAFTGSSVTGRQIMQSAARSNLKKVSLELGGKGPSIVFADADWENALLWTTMGITASNGQICAAGSRIYVQDTIYEKFIQEFSRRSRDAVHGDPLLDETTKGAVASKAQLDKILSYVGKAKQTKARLLHGGQPLPGKGHFMANTAFVDVDQDDTIMREEIFGPFASIAPFSTEDEVIRKANDSDLGLNSAVFTNDVSRAFRISEAIETGTVTVNCWAMLNANTPFGGVKESGFGRDSGQEALDNWTVTKTVKFNILPPKL

SEQ ID NO: 135 - DNA, 1488 bp, Gibberella zeae PH-1
  CDS (1)..(1488)
atgacatcaactacacaaatctcattacctaatggcaagaagtacgaccaaccaactggtctcttcatcaacaatgagtttatcgcagctacaggcgacgaatttgtcgtgacgaacccgcacacagaggaagaagtcatcaagctcaagggcgcatcaaaagaagatgtcgacaaagccgtccaggctgctcgtaaagcctttgagggcgagtggtcggagcttgctgctgttgaccgcggcgcttttctttacaagattgccgatctgattgatcgcgaccgtgagctcattgccgctattgatgcttttgacaatggcaagcccttcagcgcctgtctcgctggtgatctcgacgagtcttacaacgtcttccgctactacgccggtgccgccgacaagatcagcggcaaaaccatcgagacttctcccgccaagctcgcatacgttctacaggaacctctgggtgtctgtggacagattattccctggaactttcccttcatgatgctggcctggaaggttgcgcccgctctggcctgtggtaacacggtcatccttaagcccgccgagcagaccccgctatctgccctgtactttggcaacttagtcaaagaggctggtcttcctgcgggcgtcgtcaatgtcctacctggtcttggcccttctactggaaaagctattgctggacatatggatattgacaaggttgcctttaccggtagtaccaacaccggccgagccattatgaaggacgctgcgaacaacctgaagaacatcacacttgagtgtggtggtaagagcccctctatcgtctttgcagacgcagagctggagcaggctgtcaagtggtgccattttggaatcatggataataagggagaggtgtgcacttctacctccagaatctacgtccacgaggacatctacgataagttccttgagaagttcgttgaagttacaaaggagaatgacaagctcggcgctcccttcgacgagtcgaccgtccaaggaccccaggtctccaagacacaatacgaccgcgtactctcctacatcgaggagggtcgcaagtctggtgctaagcttctatacggaggtagcaagcatggtggcaagggttacttccttcaacccacagtctttgccgatacaactgaagacatgaagatcatgaaggaagagatctttggccccgtcgtttccatcgccaagttctccactgacgaggaagctatcaaaaaggcaaatgacacttcatatggtcttgccgcggctctgttcacagaaaagattgctcgtgcacacaaggttgcccgcaagcttcaggctggcatggtatggattaactcgtctggtgattcccactttggtattccatttggtggttacaagtcttcaggcattggtcgcgagttgggacagtatgctttggatgcttacacacagcccaaggctgtccatgtcaacttgggatttgaattatag

SEQ ID NO: 136 - protein, 495 aa, Gibberella zeae PH-1
MTSTTQISLPNGKKYDQPTGLFINNEFIAATGDEFVVTNPHTEEEVIKLKGASKEDVDKAVQAARKAFEGEWSELAAVDRGAFLYKIADLIDRDRELIAAIDAFDNGKPFSACLAGDLDESYNVFRYYAGAADKISGKTIETSPAKLAYVLQEPLGVCGQIIPWNFPFMMLAWKVAPALACGNTVILKPAEQTPLSALYFGNLVKEAGLPAGVVNVLPGLGPSTGKAIAGHMDIDKVAFTGSTNTGRAIMKDAANNLKNITLECGGKSPSIVFADAELEQAVKWCHFGIMDNKGEVCTSTSRIYVHEDIYDKFLEKFVEVTKENDKLGAPFDESTVQGPQVSKTQYDRVLSYIEEGRKSGAKLLYGGSKHGGKGYFLQPTVFADTTEDMKIMKEEIFGPVVSIAKFSTDEEAIKKANDTSYGLAAALFTEKIARAHKVARKLQAGMVWINSSGDSHFGIPFGGYKSSGIGRELGQYALDAYTQPKAVHVNLGFEL

SEQ ID NO: 137 - DNA, 1455 bp, Gibberella zeae PH-1
  CDS (1)..(1455)
atgtctacaaacagcacaaagactctcaacctcaaggacaactacgtccagatcatcaatggcaaaagcgcccctactcaaaagacccaccagggtataaacccggctactctcgaaaagaagcccgaagttcctgtcgcctcccaagatgacttgaacaacgccgtcgacgctgcgagaaaggccttcaaatcttggtccaaggtcccttgggaggagcgacgacaaaagctctttgcttgggcagatgccgtcgaggctcagaagaaggaatttgctcagcttctcacctcggagcaaggaaagccggtcgcgcaagctaacggcgaggctgatgccgctgttgcttggatcaagggacaagcgagccttgatcttaccgaagaagtcgttgaggatagcgatactcgaaaggttgtcacaagatacacaccccttggcattgtcgctgccatcgttccctggaacttccctcttatgcttgctgcttccaaaatcgcccccgctctgctgacaggaaacgtcatcattgtgaaaccctccccattcaccccatactgtggactgaagctcgttgaacttgcgcagcaattcttcccccctggtgtcgtgcaatcactcagcggagacgacaaccttggaccctggattaccagccatcccggcattgacaagattagctttactgggtctacacatactggaaagctggtcatgcaaagcgctgccaagacactgaagcgtgtgactctcgagctcggcggaaatgatgctgcggttgtctttccagatgttgacatcgactcagtagccgaaaaggtctcaaccctggcattcatgaactccggtcaaatctgcctcaacgtcaaacgcatctacgttcatgaatcaatctatgagaaattccgcgatgccgttgtcaaccatgtcaagaactataagcttggtgatggatcagaagaagtaaccagccacggtcccgttcaaaaccagatgcagtacaacagagtcaaaaccttcttcgaggacatcgagaaacaaggatggaaagttgccaccggtggaaagttcgatcctgagcctaagaatgggtactacatcacaccaactgtgattgacaacccacctgaggattcaagaattgttgtcgaggaaccgtttggccccattcttcctcttctgtcatggaagaatgaagaggaggtcattgagcgcgccaacgatacacgacttggcttgggtgcttcagtctggtcagctgatttagagacagccgagagagtcgcgaagcagctcgatgcagggactgtttgggttaatactcattttgatatcacaccgatggcaccatttggggggcataaagaatccggcattggtgctgaatggggtattaatggccttaagggcatgtgtaatgtacagagtttgttcctgagtaaggttgctgcttag

SEQ ID NO: 138 - protein, 484 aa, Gibberella zeae PH-1
MSTNSTKTLNLKDNYVQIINGKSAPTQKTHQGINPATLEKKPEVPVASQDDLNNAVDAARKAFKSWSKVPWEERRQKLFAWADAVEAQKKEFAQLLTSEQGKPVAQANGEADAAVAWIKGQASLDLTEEVVEDSDTRKVVTRYTPLGIVAAIVPWNFPLMLAASKIAPALLTGNVIIVKPSPFTPYCGLKLVELAQQFFPPGVVQSLSGDDNLGPWITSHPGIDKISFTGSTHTGKLVMQSAAKTLKRVTLELGGNDAAVVFPDVDIDSVAEKVSTLAFMNSGQICLNVKRIYVHESIYEKFRDAVVNHVKNYKLGDGSEEVTSHGPVQNQMQYNRVKTFFEDIEKQGWKVATGGKFDPEPKNGYYITPTVIDNPPEDSRIVVEEPFGPILPLLSWKNEEEVIERANDTRLGLGASVWSADLETAERVAKQLDAGTVWVNTHFDITPMAPFGGHKESGIGAEWGINGLKGMCNVQSLFLSKVAA

SEQ ID NO: 139 - DNA, 1503 bp, Gibberella zeae PH-1
  CDS (1)..(1503)
atgagtttagacatccaacttactgcccccaatgggcgcacttacaagcagcccaccggtttgttcatcaacaatgaatgggtcaagtcgtccaatggcgaaaagataacttctataaacccaaccaacgagcaagaaatcacatccgtctacgctggttcgtcagaagacgtcgacaaagccgtccgcgctgcccgccgtgccctccacaacccatcatggcgagatctcccaggtaccgagcgcggtaaactgctcagccgccttgctacacttgtcgaagaaaacaaagagatcctcgctacgatcgaaacatgggataatggaaagccttacactgtcgctttgaacgacgacgtcaatgaagtcgctgagacattgagatactatggtggctttgcggataaggtgtatggacaagtcatcgaaacaacaggtgacaagtttggatacaccattcgtgaacctattggcgtctgtggacaaatcattccgtggaacttcccacttgcaatggcagcttggaagctcggcccagctctagcatgcggcaacgcagtgatcctcaagcccgcagaacaaacacccctctcaatcctctaccttgccaatcttatcgtcgaagcaggctttccccctggtgttgtcaacatcatcaacggtctaggaaccgttgccggtgccgcacttgcttcacatatggacgtcgataagattgcctttacaggttctacacccacagcgcgcagcatcatgaagatggcaagcagcaatctgaagaacatcactttggagactggtggcaagagccctcttatcgtctttgatgatgccgatgttgacttggctgcgtactgggcccatgctggtatcatgtacaatcagggtcaagtgtgcactgctaccagtcgtatccttgtccaagagagcatctatgacaagttcatggctgctttcggagcccaagtcaagaacatctccaaggtgggcgatccctttgaggagagcaccttccaaggaccccaagtcaccaaggcccagtatgaaagaatcttatccttcgttgatgttggtaagaaagaaggtgccaaactggctcttggtggtcaaccattcaaggttggcgatggaaagggttactttgtcgaaccaacagtctttacagacgttacacccaagatgcgtgttttccaagaagaagtcttcggcccatttgtggttgttaccaagttctcttctgaagacgaggctattcacttggctaatgatacacaatatggccttggaagtgcgcttttcacaacaaatctgacaagggcgcatcaagttgccaagaggatcgaggcaggtatggtctgggtcaactcgagcaatgacagtgactggagaattccctttggcggagtaaagcagagtggtattggtcgggaattgggagaagctggtcttgcggcttattccaacatcaaggctgtgcatgtcaacattgcggcaaagctatag

SEQ ID NO: 140 - protein, 500 aa, Gibberella zeae PH-1
MSLDIQLTAPNGRTYKQPTGLFINNEWVKSSNGEKITSINPTNEQEITSVYAGSSEDVDKAVRAARRALHNPSWRDLPGTERGKLLSRLATLVEENKEILATIETWDNGKPYTVALNDDVNEVAETLRYYGGFADKVYGQVIETTGDKFGYTIREPIGVCGQIIPWNFPLAMAAWKLGPALACGNAVILKPAEQTPLSILYLANLIVEAGFPPGVVNIINGLGTVAGAALASHMDVDKIAFTGSTPTARSIMKMASSNLKNITLETGGKSPLIVFDDADVDLAAYWAHAGIMYNQGQVCTATSRILVQESIYDKFMAAFGAQVKNISKVGDPFEESTFQGPQVTKAQYERILSFVDVGKKEGAKLALGGQPFKVGDGKGYFVEPTVFTDVTPKMRVFQEEVFGPFVVVTKFSSEDEAIHLANDTQYGLGSALFTTNLTRAHQVAKRIEAGMVWVNSSNDSDWRIPFGGVKQSGIGRELGEAGLAAYSNIKAVHVNIAAKL

SEQ ID NO: 141 - DNA, 1488 bp, Gibberella zeae PH-1
  CDS (1)..(1488)
atgtctacagtcaaaattactgggattggtggacgccaaataagtgttcatactggactgtttatcaacaatgagtttgtccctgcacaagacaatgccaccgtgaagaccgaaaaccctttcaatgggaaggtactcgcggatatatcggctgctcaggcctctgatgttgacaaggctgtcgcagccgccgaaaaggctttcaatgggacctggaaattgactcagcccacggttcgaagggatttgatgaaccgtttggccgacctcatcgaaagagataacgaagagttagcctcgcttgagtctgtcgatgctggtattctattcagagaatccagtgggatgttcgttcctcaagctgtggagacactccgctactatgctggatgggctgacaaggtcgatggtcaatctctacacatccctcagggtatctcttactcgcgccgagtccccatcggcgtctgtgctgctattgttccttggaacgcaccactaatgatcactatgtggaagcttgccgcagctctggctaccgggaatgttcttattatcaaaacaccagaggcctcgccgttgtatggtcagaaactcggccagctcattgttgaagcaggatttcctccaggtgttgtcagcatactctgtggtctagggattgtggctggttcagccctttcagcacaccctgctatccgtaagctgtctttcacgggaagtcctggcgtgggccgtcagattctagctgcatctgccaagacaaatctgaagaagatcagcttggagctcggaggtaagggccctagtattgtctttgacgatgccgacttcgagaatgcacttcagtggacagcagctggtattacagtgaacaatggccagatctgtgctgcaggaagccgtatttacgttcacgctgatatctacgacaaatttgtcaaggccttttcagaaagaacaaaggattccgttgctggtgacccgttgttgcaagaaacaacgaaaggaccagttatcaacgcgggacaaaaaaagcgagtgatggaatatatcaagataggccaagatgagaaagtcaaagtcttgcacggagcagatgattccaagttacctaccgagggtcattttgtacccaacactgcttttgtggacgtcgaccctcaggcgactgtgatccgagaagaaatttttggtcccgtcgcttgcatcgccaagtttagcaccgaagaagaggttgtcaggctagccaacgatagctcctacggactcggttcggccgtctttacaaaagatatcaacaaggcgattcgtgtgagcgaggagcttgagagtggacaagttactattaacatgtggggagttgttaacgcaaacgtatcttttggtggttttaaagagagtggattcggtcgtgattgtggcaaggaggctattgacgattggacacaggcgaaatacatcagcgtgatggttccaaagttgtaa

SEQ ID NO: 142 - protein, 495 aa, Gibberella zeae PH-1
MSTVKITGIGGRQISVHTGLFINNEFVPAQDNATVKTENPFNGKVLADISAAQASDVDKAVAAAEKAFNGTWKLTQPTVRRDLMNRLADLIERDNEELASLESVDAGILFRESSGMFVPQAVETLRYYAGWADKVDGQSLHIPQGISYSRRVPIGVCAAIVPWNAPLMITMWKLAAALATGNVLIIKTPEASPLYGQKLGQLIVEAGFPPGVVSILCGLGIVAGSALSAHPAIRKLSFTGSPGVGRQILAASAKTNLKKISLELGGKGPSIVFDDADFENALQWTAAGITVNNGQICAAGSRIYVHADIYDKFVKAFSERTKDSVAGDPLLQETTKGPVINAGQKKRVMEYIKIGQDEKVKVLHGADDSKLPTEGHFVPNTAFVDVDPQATVIREEIFGPVACIAKFSTEEEVVRLANDSSYGLGSAVFTKDINKAIRVSEELESGQVTINMWGVVNANVSFGGFKESGFGRDCGKEAIDDWTQAKYISVMVPKL

SEQ ID NO: 143 - DNA, 1494 bp, Gibberella zeae PH-1
  CDS (1)..(1494)
atgggttctcgaatgacgccagaggctatcaagcctgttatgctaattgatggccaagctaacgcgtgcttaattcagctggttggggcctcagatggaaactcgtttcccctctttaacccagcaactggtgaaaaagttgcagatgtccctgaagctacagaagatgacaccaacagagctgtcgcggcagcacagcgtgcattcccagagtggtctgccatggatcctgccaagcgtggcagctacctgaagaaactcgcctctctcatcaaagagcataacgaagaacttgctcttctcgaagccaagtcaatgggtcgtcctttggctgagttcttcgagggtcacattgctgcctctagctatgagcactacgctgaagcttggccgcacatccagggccaagcgagtctcaacacacctggctatgtaaccatgaccctacgccagccttttggtgtcgtcgcagctatcattccctggaatgcctctcttctgttcttcgctagcaaatctgctcccgctttgatcgctggaaacacagtggtcgtcaaatctagcgaaaaggctcctctcggcgctgccaagttcgctgagctcattcacaaagctggtttccctcccggagtctttaacgttctatcgggtcatggaaacccctctggcgcgacgcttgcttctcatatggatgtacgggctattagtttcaccggctctagccctactggccgtgcgatccaagaggcagctgccaagtccaacttgaagaaggtcatcctcgagcttggtggtaaatctcctgtcattatttttgacgatgcggatcttgagcaggctgccaaggatactatgtacagtatccagtggaacagcggtcaggtctgcatggcaaattctcgcgtttatgtgcaagactccatcgctgataacttcatccaagcttgcaagaaagcactgtctgccgcaaagtcgggtaatcccacagagaagggcatcaatcacggtcctcaagccgacaaggttcagtatgaaaaagtcatgtcttacattaacgagggcaagaagtccggaacgctggagctcggaggaaatggaaatcttgataagacaggtggtttcttcgtcgagccaactatcttcttaaacacgcctgaggatgcaaaggttatgaaggaggaaatctttggaccggttgtcaacatcaacgtcatcaagacagaagaggaggccatcgaaaaggcaaatgacacagagtatggtctgtatgctgcagtatataccaagaatgtcgacagggcgatgagggtcactcagaagctcaactctggttacgtaggcatcaactgtaccagtcctaccaccgcgagggatctgccctttggaggatacaagtcatcaggccagggccgagagggctggctttacagtttggacaacttcttggaagtcaagagtgtgatgatgaaagtagacagcggttccaagttataa

SEQ ID NO: 144 - protein, 497 aa, Gibberella zeae PH-1
MGSRMTPEAIKPVMLIDGQANACLIQLVGASDGNSFPLFNPATGEKVADVPEATEDDTNRAVAAAQRAFPEWSAMDPAKRGSYLKKLASLIKEHNEELALLEAKSMGRPLAEFFEGHIAASSYEHYAEAWPHIQGQASLNTPGYVTMTLRQPFGVVAAIIPWNASLLFFASKSAPALIAGNTVVVKSSEKAPLGAAKFAELIHKAGFPPGVFNVLSGHGNPSGATLASHMDVRAISFTGSSPTGRAIQEAAAKSNLKKVILELGGKSPVIIFDDADLEQAAKDTMYSIQWNSGQVCMANSRVYVQDSIADNFIQACKKALSAAKSGNPTEKGINHGPQADKVQYEKVMSYINEGKKSGTLELGGNGNLDKTGGFFVEPTIFLNTPEDAKVMKEEIFGPVVNINVIKTEEEAIEKANDTEYGLYAAVYTKNVDRAMRVTQKLNSGYVGINCTSPTTARDLPFGGYKSSGQGREGWLYSLDNFLEVKSVMMKVDSGSKL

SEQ ID NO: 145 - DNA, 1518 bp, Gibberella zeae PH-1
  CDS (1)..(1518)
atggcacacgaactgcctttcaagattcctacattgcaggtcaaacaacaagcgccctctcaggtgcaacctttgacgtcctcggtaatcctcccctccaactctcttaccacgctgacaaccccagatcctggaacaaacaaaccctgggcaaaagtaaaagacaactcagcagacgacgtggaccacaccgtacaagtcgcatatgatgctttccaaacgttcaagaaaacgtcccccaggttacgcgcacagtggctattaaaatgggatgccctcatccgtgagcacaaggcggatttggccaccctgcttgtctacgaaacgggcaagccgtacgctgaagccattggagagatggactattctctgacgtttacttcatggtttgctggcgaggcggagcgtatccagggaacatgctttatgccatccgcaccaaacagacgggtctttaccattaaacagccacttggtgttgcagtagcgctcgttccctggaacttccctgttgccatggttctacgaaaggccgcagcagcgttggcggctggatgcacaatggtggtgaagccatcaccagaaacaccagtgactgccatggctttggccaagttagcttcggaggcgggattcccaaacggcgttttgaacatcttgcctaccagcttggataatacgccgtcgctgagtgaagcactttgcaagcatgaccttgttaaaaaggtcaccttcactggatcgacgcgcgtcggaactttggtcgcgaacctatgcagtttgggcctcaagaaagtcgtccttgagcttggaggcaactgtccctgtctaatcttcaatgacgccgatatagaagcagccctacgtgagcttgtaggcctcaagtggcgtcacgctgggcaagcttgcgtcacagtaaatcgcttccttgtccaatcagccgtgtacgacaaattccttcaacgcttcgcggaagaaacagcaaagtatgtcgtcggccacggcgcttctgagggaaccactctcgggccagtaacaaagcccgagagcctggatagagctgagcgactcatcaaagatgccgtttcaaaaggtgcccggatcgttacgggcggtaatcgtctttctcccaaggatggcgaagggggatacttttttgaaccaaccatcctggcggacatgactcacgacactcttatttcttgcgaagagtgttttgcgcccattgctgcgttttataagtttgagactgaggaggaggccgttcgggtggctaatgatacgccgatgggcttggccagctatgcttttaccaaggatgccgatagaatttggagactctttgagaatcttgaagctggcatgattgcgcttaatactggtaattcctccgcggctgagtcaccctttggagggatcaaaatgtctgggtatggaaaggaggctggaaaggatgtggcggtaaacgagtatatgatacaaaaaacaggcacaatcacggtcgatggtttggtgtag

SEQ ID NO: 146 - protein, 505 aa, Gibberella zeae PH-1
MAHELPFKIPTLQVKQQAPSQVQPLTSSVILPSNSLTTLTTPDPGTNKPWAKVKDNSADDVDHTVQVAYDAFQTFKKTSPRLRAQWLLKWDALIREHKADLATLLVYETGKPYAEAIGEMDYSLTFTSWFAGEAERIQGTCFMPSAPNRRVFTIKQPLGVAVALVPWNFPVAMVLRKAAAALAAGCTMVVKPSPETPVTAMALAKLASEAGFPNGVLNILPTSLDNTPSLSEALCKHDLVKKVTFTGSTRVGTLVANLCSLGLKKVVLELGGNCPCLIFNDADIEAALRELVGLKWRHAGQACVTVNRFLVQSAVYDKFLQRFAEETAKYVVGHGASEGTTLGPVTKPESLDRAERLIKDAVSKGARIVTGGNRLSPKDGEGGYFFEPTILADMTHDTLISCEECFAPIAAFYKFETEEEAVRVANDTPMGLASYAFTKDADRIWRLFENLEAGMIALNTGNSSAAESPFGGIKMSGYGKEAGKDVAVNEYMIQKTGTITVDGLV

SEQ ID NO: 147 - DNA, 1503 bp, Gibberella zeae PH-1
  CDS (1)..(1503)
atgtcagacttgtacgttaacctcgaggcccctaacggcgtcaagtacagacagccaacgggcctctttatcaacaacgaattcgttcctggatcgtcaactcaaaagattacatctatcgaccctgctaccgagaaggaaattgctacagttcacgcagccaatgctgatgatgtcgacaaggccgtcaaggcagcctacgatgcgtttcgcaacccctcatggaagaagctgcctcctcctcagcgaggtgttttgatgaacaagcttgccgactacattgaggagcgcaccaagatctttgccacttcagaggcttgggacaatggcaaggtttacactgatgccgagggcggcgacgttgtcgaggttatcaacaccatccgctactacgccggctgggccgacaagatcaccggccagacaattactgccaaccccaacaagcttgcctacactctccgccaaccccttggtgttgtcgcccaaatcatcccttggaactaccctcttgccatggccgcctggaaaattggccctgcgctagcatgtggtaacaccattgttatgaaggctgctgagcaaacacccctcagtatcctgcttctcggcgaggctatcaaggcagttggattcccccctggtgtctttaacgctctcaatggctacggtagcgaggctggacctgctcttgtcgagcaccctcttgttgacaaggttgcttttactggctcaactgctaccggtgctaggattatggagatggcttccaagaccctcaagaacatcaccctcgagacgggtggtaaatcacctcttctggtcttttctgatagtgacatcgacgaagcagtcaagtggtcgcatatgggtatcatgtctaaccagggccagatctgtacagctacgtcgcgtctgttggtccaggacaaggtatacgacgaatttgtccagcgcttcatcgagacgaccaagacagtcagcaaggtcggtcaccaatgggactcagagacatatcagggtcctcaggtctcaaagcaacagtacgaccgcatcctcgagtatatccagattggaaagtccgagggtgccactcttctcgctggtggacagcctgtggattcttccaagaagggcttcttcatccagcccactgtctttggcgacgtccaccaccagatgcgtgtcttccgtgaggaaatctttggccctgtggtagtcatcaccaagttcagtgatgaagcagaggctctcaagctcgccaacgacacgacctacggtctcggcgctgctgtctttacaaaggacgttgagcgtgcccaccgtgttgctgctgagattgaggctggtatggtttggatcaactctacacaggactctgagccttacatccccttcggtggtgtgaagcagagcggcattggtcgtgaacttggtgaagctggtcttgaagcatacagcaacaccaagtccatccacgtcaacttgggttctcgtctgtga

SEQ ID NO: 148 - protein, 500 aa, Gibberella zeae PH-1
MSDLYVNLEAPNGVKYRQPTGLFINNEFVPGSSTQKITSIDPATEKEIATVHAANADDVDKAVKAAYDAFRNPSWKKLPPPQRGVLMNKLADYIEERTKIFATSEAWDNGKVYTDAEGGDVVEVINTIRYYAGWADKITGQTITANPNKLAYTLRQPLGVVAQIIPWNYPLAMAAWKIGPALACGNTIVMKAAEQTPLSILLLGEAIKAVGFPPGVFNALNGYGSEAGPALVEHPLVDKVAFTGSTATGARIMEMASKTLKNITLETGGKSPLLVFSDSDIDEAVKWSHMGIMSNQGQICTATSRLLVQDKVYDEFVQRFIETTKTVSKVGHQWDSETYQGPQVSKQQYDRILEYIQIGKSEGATLLAGGQPVDSSKKGFFIQPTVFGDVHHQMRVFREEIFGPVVVITKFSDEAEALKLANDTTYGLGAAVFTKDVERAHRVAAEIEAGMVWINSTQDSEPYIPFGGVKQSGIGRELGEAGLEAYSNTKSIHVNLGSRL

SEQ ID NO: 149 - DNA, 1485 bp, Gibberella zeae PH-1
  CDS (1)..(1485)
atggctgaaaactaccacaaggaggtcatttctggcctcaagaacaagagccttttcatccaggacgcctttatcaacggccaatgggttgccaaagagaacaagtttgatgtctttgagccttctactgccaccgtcctcggtcaagtcgccaactgtgccctcgaggacttccaaaccgccatcaagagcgccgatgtcgcccagacaaagtactttgacagcacaactggcgccagccgaggtgccatgttgagaaagtggtatgacttggttctcgccaaccaagaggatctcgccaagatcctttctctcgaaaacggaaagacctactctgaggctctcggagaggtcatttactcggccagctttatctcatggttcgccgaggaggctacacgatcctatggtgtcacaatcccctcttcagctcctcacactacactcatgacaattcgggagcccgttggcgtctgcggtatcatcaccccctggaacttccccgccgccatgatcacccgaaagatcgctcccgctctggccgccggatgttctgtcgtcatcaagcccccttccgagactccttactccgctctcgccttcaccaagctcgccattgaagccggtcttcctcctgctactatccaggttctgcccacgcgcgaccgtcaagctgctaccgagcttgctaccaaccccctcgtcaagaagatctctttcaccggctccactggtgttggcaagtaccttgctaagcttgctgctggtaccctgaagaagctaagcttggaactcggtggcaacgctcctttcatcgtctttgaggatgccgacctcgacctggctgctgaaggcgctatgttctgcaagttccgatgctctggacagacttgcgtctgcgccaaccgactctacgtccagaagagcgtcgctaaggagttcactgccaagctcgtcgaaaaggtcaacgctctaaagatgggcggtggtctcgacaagaccaccacccaaggacctcttgtcaacaagtctgccatcgacaaggtcaaggagcacatcgccgatgccacatccaagggcgctaagatcgctaccggcggctctacccccgacagccctggtttcttccaccagcccaccgttcttactggtgtgacacaagagatggccgttgctaaagacgagacattcggtcctctagcccctgtcttcgagttcgacacagaggaggatgccatccgtctcgccaacgacacagagttcggtcttgccggatacttcttctccaaggacatcagccgtgtcatgcgtgttgcccacaagatgcaagtcggtatggttggtgccaacacaggcaagatcagcgctgccgaggcgcctttcggcggtgtcaaggagagcggttacggaaaggagggtagtctgtacggtatggctgagtaccaaaacatcaagtccatcaccatcggcaacctcaacaactag

SEQ ID NO: 150 - protein, 494 aa, Gibberella zeae PH-1
MAENYHKEVISGLKNKSLFIQDAFINGQWVAKENKFDVFEPSTATVLGQVANCALEDFQTAIKSADVAQTKYFDSTTGASRGAMLRKWYDLVLANQEDLAKILSLENGKTYSEALGEVIYSASFISWFAEEATRSYGVTIPSSAPHTTLMTIREPVGVCGIITPWNFPAAMITRKIAPALAAGCSVVIKPPSETPYSALAFTKLAIEAGLPPATIQVLPTRDRQAATELATNPLVKKISFTGSTGVGKYLAKLAAGTLKKLSLELGGNAPFIVFEDADLDLAAEGAMFCKFRCSGQTCVCANRLYVQKSVAKEFTAKLVEKVNALKMGGGLDKTTTQGPLVNKSAIDKVKEHIADATSKGAKIATGGSTPDSPGFFHQPTVLTGVTQEMAVAKDETFGPLAPVFEFDTEEDAIRLANDTEFGLAGYFFSKDISRVMRVAHKMQVGMVGANTGKISAAEAPFGGVKESGYGKEGSLYGMAEYQNIKSITIGNLNN

SEQ ID NO: 151 - DNA, 1428 bp, Gibberella zeae PH-1
  CDS (1)..(1428)
atggccgaaagcaatgcaaccggctccaaagcttctacttccctcgccatcgaaatcttcacacagtccctctcattattaatggcaaagacgtcattacagacgaaactatctgaccaacacgttctcgacgctgtacatgcagcaaagacggccttcccgagctggtctgcgacaaagccatccgaacgcagggatatctttcttcgcgctgccgatatatttgctaaacgcaagggcgagctatctggctatataagagaagagatcggtgcaagcaaagaataccaggagttcattatcggtctagccatcgaaggcttgagggatactgccgggaggattgctggagctgttacgggccagatacccgtatcaattcacccagatacatcggcacttgttctcaaaagaccttatggagttgttcttggcattgcgccttggaacgccccttatcaccttggtcttcgatccataacattcccactggctactggcaacactgctattctgaagggacctgaactctctccaagatgctactgggcgttctcagacgtgttcagggaagcaggactccccgatggcgttctaaacaccattttccacaaaccgtctgatgctgcagtggtcacagaccagctgattgctcatccagatatcaagaaaattaacttcactggcagctcaaaggttggaagtattatatctgccaccgcggggaagcacttgaaacctgtcctgatggagcttggaggaaaagccagtgccttggttcttgaggatgccgacttggacaatgctgctgtccagtgtacattgggggcctttctgaatgccggccagatatgcatgtcgacagaacgtattctcgttcactcatccattgctgacgtattcaaaaccaaactccagaatacgataaaggccatgtttggatcatccgagacaacgccagtcttggtgacggctggttctgccaagagaaaccgcgatcttgtcaacaacgcacttgctcagggggccgaagtagtctatggcgaccctcaacccgttgagggcgcagcgaccaagatgacgccagtagttttgacaaacatgaacaagaacatggatatctacaagacagaatcctttggccccagtgtatcactcttcacattcaacgatgaggatgaggcattgaagctggttaatgatacggattatggactgtctgcctctatcttcaccaaggatctcaacaaagcattttcactggcggagaagatcgactctggtgctgtgcatatcaactctatgtctgttcatgatgagtttgcgctgccccacggtggagtcaaaagcagcgggttcgggcggttcaacggctaccaaggtttggacgagttcctttactacaagacagttacgtggacacagtaa

SEQ ID NO: 152 - protein, 475 aa, Gibberella zeae PH-1
MAESNATGSKASTSLAIEIFTQSLSLLMAKTSLQTKLSDQHVLDAVHAAKTAFPSWSATKPSERRDIFLRAADIFAKRKGELSGYIREEIGASKEYQEFIIGLAIEGLRDTAGRIAGAVTGQIPVSIHPDTSALVLKRPYGVVLGIAPWNAPYHLGLRSITFPLATGNTAILKGPELSPRCYWAFSDVFREAGLPDGVLNTIFHKPSDAAVVTDQLIAHPDIKKINFTGSSKVGSIISATAGKHLKPVLMELGGKASALVLEDADLDNAAVQCTLGAFLNAGQICMSTERILVHSSIADVFKTKLQNTIKAMFGSSETTPVLVTAGSAKRNRDLVNNALAQGAEVVYGDPQPVEGAATKMTPVVLTNMNKNMDIYKTESFGPSVSLFTFNDEDEALKLVNDTDYGLSASIFTKDLNKAFSLAEKIDSGAVHINSMSVHDEFALPHGGVKSSGFGRFNGYQGLDEFLYYKTVTWTQ

SEQ ID NO: 153 - DNA, 1530 bp, Gibberella zeae PH-1
  CDS (1)..(1530)
atgacgttcccatccgatattcacactttccactcgggacgacctcagcccgagtcatcgtcaaaatccaatacttttgtatcggtcgatccaagcaacgcaaaaccccttgcaactatctacaccaccacatcagaacaactcaaccagacagtcgcagctgcccaagctgcgttccctgcctggtcccaaactccagctcctcgacgtgctgccattctcctcaaggcggcctctatcctacgtgagcgcaatgatgagcttgcattgaccgagacgcttgatactggcaagccttggtcagagacttcgaccgttgacgttgtaaccggcgccgacgttctcgagtactacgcacacatggccgcaggcagctttcctggccaaaacactcgtcttcgcccggacgcctttgtccttacaacccatgagccccttggcgtttgtgctggcattggtgcttggaattatcccattcagatcgctctctggaagtcagcgccatgcctggccgctggtaactgtatggtctacaagcccagtgaggtcacaccccttcatgccgaaacactcgcccaaatctacattgaggctggtgtccctccaggagtattcaatgttgtatacggcgacggtatcgccgtaggcgcacccctcgtggctcatagtggcattgccaaggtgagcttcaccggtcaagtaagcacaggcagcaaggttgccagccaagcagtcacagatatgaagggtgttactatggagctgggaggaaagagccctctcgttattctacctgatgccgacgtggaggacgcggccgacaccgccatggtcgccaacttcttctccaccggtcaagtgtgcaccaacggaacccgtgtgtttgtcccagacacgcttctctcccaggtggaggaagccattgtccagcgatgtcgagagggaatccgcatgggtctgccacgaaagaccgagaccaacttcggtcccatggttagcgccgcacaacaggagaaggtcaaaatgtacattcaacacggtcgcacagtggacaaggccaaggttctattcaatggttctcaagaggccagcatgccacagccaacttctgacggcttttgggttcaccccgttgtctttaccaactgcaccgacgacatgcgcgtgacgagagaagagatctttggtccagtcatgtgcattatgccttataagacacagggacgccctcgtcaagagtggctatcagacctcatcgcccgagccaacgataccccaatgggacttgctgctggtgttgtctcttctgacgtcggcttggcgcaagaagtcgttcaaaagctcgacgctggtattacctggattaacacttggggtgaatctcccgcggagatgcctgttggaggttggaagatgagtggcataggcttggagaacggccatgagggcatctcagcctacatgaggacgaagagcacactgatccagctgggtaggggagcctgcaagggtgttttctccaaattgtag

SEQ ID NO: 154 - protein, 509 aa, Gibberella zeae PH-1
MTFPSDIHTFHSGRPQPESSSKSNTFVSVDPSNAKPLATIYTTTSEQLNQTVAAAQAAFPAWSQTPAPRRAAILLKAASILRERNDELALTETLDTGKPWSETSTVDVVTGADVLEYYAHMAAGSFPGQNTRLRPDAFVLTTHEPLGVCAGIGAWNYPIQIALWKSAPCLAAGNCMVYKPSEVTPLHAETLAQIYIEAGVPPGVFNVVYGDGIAVGAPLVAHSGIAKVSFTGQVSTGSKVASQAVTDMKGVTMELGGKSPLVILPDADVEDAADTAMVANFFSTGQVCTNGTRVFVPDTLLSQVEEAIVQRCREGIRMGLPRKTETNFGPMVSAAQQEKVKMYIQHGRTVDKAKVLFNGSQEASMPQPTSDGFWVHPVVFTNCTDDMRVTREEIFGPVMCIMPYKTQGRPRQEWLSDLIARANDTPMGLAAGVVSSDVGLAQEVVQKLDAGITWINTWGESPAEMPVGGWKMSGIGLENGHEGISAYMRTKSTLIQLGRGACKGVFSKL

SEQ ID NO: 155 - DNA, 1479 bp, Gibberella zeae PH-1
  CDS (1)..(1479)
atggcagaaattaccatcactggcgccggcggtcgcaagatccaaatcccaaccggtctctttatcaacaatagattcatcccttccactacctctgaaaccctcacgaccgaaaaccccaccaccaacacccccctcggtcaggtctcagccgcccaaccctccgatgtcgacgccgcagtctcttcttccaaggaagctctcaagacatggaagactagccagcctgccgagcgacgaaggttgctcaacagactagctgatcttattgagcgagatgctcgagagctggcttcaattgaagcaattgacgctggcatgttgttcaacatgtcacttggcttctgcattgtccaagctgtcgagacacttcgatactttgcaggatgggcagacaagattgatggacagtcattagaatttgaccaaggattggcgtacaccaagcgagagcctatcggcgtttgtgctgcagttgtgccatggaacactccccttctgataaccgcatggaagctcggtccagccctcgcagctggaaatactctcatcataaagacccccgagctagctcccctctacggtcagaagctagcccaactcgtcctcgaagctggcttcccaccaggtgtggtcaacatcataaccggtctgggcccggtagcaggccaagccctcgccgatcatcaccaagtccgcaagatttccttcactggtagtctggctgtcggacggacgatccttgtcagcgcggcaaagtcgaacctcaagagagtcacgcttgaattaggcggtaaaggtccaagcatcatttttaacgatgctaatttcgagaatgctcttgcctttgcgacggcaggaatcacaatgcacaatggacagatctgcgcggctggaagtcgcatttatgtccaggcagatgtctacgaccgtttcgtttctgagtttgcggccaagacgagggatgctgtcatgggcgaccctcttctcgacgatacagtcaagggtcctgttatcagctctactcaaaagaatagaatcatggaatacatcaccaaagccaagagcgaaggaattgaactcttgcacggatcagccgaacccgacagcaagggcaactttgttcccaacactgcctttatcaacgtctcgcccacggcaaccatcatgcgcgaagaggtttttggaccggtcgctagctttgccaagttcaagacggaggaggaagtcatctcactagccaacgataacgaatatggtttggcggctgcggtctttacgaatgatatcagcagggctgtcagggtgtctgatcagattgaggtgggcattgtctttgtcaatacctggggcagtatcagtgcaaatagtccatttggaggtataaaacagagtggattcggcagggagaatggtactgatgcgcttaatgattggacgcaggtcaagtgtgtcaagattaatgttttcaacttgtga

SEQ ID NO: 156 - protein, 492 aa, Gibberella zeae PH-1
MAEITITGAGGRKIQIPTGLFINNRFIPSTTSETLTTENPTTNTPLGQVSAAQPSDVDAAVSSSKEALKTWKTSQPAERRRLLNRLADLIERDARELASIEAIDAGMLFNMSLGFCIVQAVETLRYFAGWADKIDGQSLEFDQGLAYTKREPIGVCAAVVPWNTPLLITAWKLGPALAAGNTLIIKTPELAPLYGQKLAQLVLEAGFPPGVVNIITGLGPVAGQALADHHQVRKISFTGSLAVGRTILVSAAKSNLKRVTLELGGKGPSIIFNDANFENALAFATAGITMHNGQICAAGSRIYVQADVYDRFVSEFAAKTRDAVMGDPLLDDTVKGPVISSTQKNRIMEYITKAKSEGIELLHGSAEPDSKGNFVPNTAFINVSPTATIMREEVFGPVASFAKFKTEEEVISLANDNEYGLAAAVFTNDISRAVRVSDQIEVGIVFVNTWGSISANSPFGGIKQSGFGRENGTDALNDWTQVKCVKINVFNL

SEQ ID NO: 157 - DNA, 1473 bp, Gibberella zeae PH-1
  CDS (1)..(1473)
atggcctctccaaagcttagcgacccttcgctcatcaagaacgcatgctacgtcaatggacaatgggtagctgcaaagtccggcaaggacttttctgtcgagaaccctgcaagccttgaaaagcttggaagctgtcccgagttcgacgcaaatgataccgaagccgctatcgctgccgctgacgccgcatacaaaacataccgcaagacaccagcacgacagcgagcccggtacctccgccgctggtatgacctcatgatggaaaatgccgacgatattgcacgactcatcactcttgagaacggcaaagtttggtcggatgccaagacagaggccgtctacgctgcgaacttctttgaatggttctcagaagaggctcctcgaatttatggcgagactatcgaggcatcaaacccatcatgccgtctatcaacgatcaagcaacccgtgggtgtttgcggtctcattgcgccgtggaacttccctgccgccatgattacccgcaaggctggacctgcgctggctgctggctgtaccgttgttatcaaggctcctgccgaggcccctctaacagctcttgcactcgctgaactagcgcatcgcgctggtattcctgccggtgttgtgaacatcattactgcgctggataacactgctgaggttggtaaagtcctgacgacccatcccaagatcaagaaggtttcgtttaccggctcaactggcgtcggtcgactcctcatgaaccagtcttcctcaaccgttaagaagctgtcctttgaactgggcggaaacgccccatttattgtatttgaggatgcagatttggaaaaggctgtcaagggtattatcacctccaagttccgaaactcaggtcagacctgtgtttgcgccaaccgtatctttgtgcatcgcagcatttacgacaagttcgtccagatggtcctcgacgttgtcaagacctttgttattggagacggtttcggcgagaagacgacccacggtcctcttatccacggccgtgcagtggccaaaactgctgagcatgtcgaagatgctatttccaagggagcaaagcttatccatggtggggagcgtctagcggatcttggacccaacttcttcggcctcacgatgttgacagacatgacacctgacatgaagatcttcagtgaagagactttcggtccagtggctgctttctttgcatttgataccgaggaggaggttatcgagcttgccaatgacagcgaagtcggtctgggaggttacttcttcagtgagaacgtgaaccgatgttatcgagtggcagaggctttggaagtcggtatgattggtgtcaactgcggtgtactcagtgatcctgccgcacctttcggtggcatcaagcagagtggattcggaagagaaggaagcaagtacggtatcgatgagtttacagttaccaagatggttatgacaaacattgatccataa

SEQ ID NO: 158 - protein, 490 aa, Gibberella zeae PH-1
MASPKLSDPSLIKNACYVNGQWVAAKSGKDFSVENPASLEKLGSCPEFDANDTEAAIAAADAAYKTYRKTPARQRARYLRRWYDLMMENADDIARLITLENGKVWSDAKTEAVYAANFFEWFSEEAPRIYGETIEASNPSCRLSTIKQPVGVCGLIAPWNFPAAMITRKAGPALAAGCTVVIKAPAEAPLTALALAELAHRAGIPAGVVNIITALDNTAEVGKVLTTHPKIKKVSFTGSTGVGRLLMNQSSSTVKKLSFELGGNAPFIVFEDADLEKAVKGIITSKFRNSGQTCVCANRIFVHRSIYDKFVQMVLDVVKTFVIGDGFGEKTTHGPLIHGRAVAKTAEHVEDAISKGAKLIHGGERLADLGPNFFGLTMLTDMTPDMKIFSEETFGPVAAFFAFDTEEEVIELANDSEVGLGGYFFSENVNRCYRVAEALEVGMIGVNCGVLSDPAAPFGGIKQSGFGREGSKYGIDEFTVTKMVMTNIDP

SEQ ID NO: 159 - DNA, 1500 bp, Gibberella zeae PH-1
  CDS (1)..(1500)
atggccaatccttttcaacgcccattccaactcgagaacgagtccctcttccattgcacgtctctgatcaatggagacttcgtatccgccaaggagggtaaaaccttcaacgttgttgatccgggatccggaaagacgtgggcatcttgtccagattgcacagcgtcagatgttgattccgctgttgcgtcctcatatgaaacattcaagacttactcaaagacgacgccacggttcagagcacagactctgatgaaatggcacaacctgatccttgccgcccgtgaagatctagcacgcattcttgtccacgagacaggaaagacactcgtggaagcgcgaggtgaaatcgattatgcccttacctttgtttggtggttctctggagaggctgatcgggcgcatggtacttcaatgagctgtgctatccctggtcggcgcgcggtgaccattaagcaacctattggtgttgccgccgcccttgtcccatggaatttcccaatcgcccttgcactacgcaaggctgctgctgctttggctgcaggatgtaccatggtcgtcaagccttctccagagacacctttgacatgtgtttcaattgcacacctcgctttggaagccgggtttcctcgtggagctctgaacgtggtgacgacatcactggagaatacaccaactgtggccgaggctctgtgtttggatgcgcgggtcaagaaggtgagcttcacaggcagcacgagggttggaaagatcatcgccagcttttgtgcgccgaatctcaagaagacaacctttgaactagggggtaactgcccattcatcgtgtttgatgacgcagatgtcggccaagctgtatctcaactcatgcctctgaaatggcgacacgctgggcaggcgtgcatcacctccaatagggttttcgtgcatagcagcatctacgacacgtttgtcgaaaaggtcgtacaagaaactcgtggattgaaactaggacacggtatggaggaaggcagcactatgggcgcgttgacaactccacgggggctcgacaaggcagaagaattgtaccaagacgccatcagcaagggcgcaaagactgtcctcggtactggaaaacgtgaagaaggacaaggttacttcatggcgcctacgatattgactgaaatggaagacgacatgctcatgacgcacgaagaaatattcgcgcctgttctcggattctaccgcttcgagagtgaagaggaggttgtgcagagagcgaatgacacgcctctgggattagcaagttacatcttcaccaagaatgtcgatagactatggcgattgttcgaaaatctggacgcaggcatgattggtctgaacgcgggcaacagctcatctgccgaagctccatttggcggcatcaaagatagtgggcatggcaaggaaagtggaaaggatgtcgcgattgatgagttcttgatcacaaagactgcgacgttgacgattgatggacattattga

SEQ ID NO: 160 - protein, 499 aa, Gibberella zeae PH-1
MANPFQRPFQLENESLFHCTSLINGDFVSAKEGKTFNVVDPGSGKTWASCPDCTASDVDSAVASSYETFKTYSKTTPRFRAQTLMKWHNLILAAREDLARILVHETGKTLVEARGEIDYALTFVWWFSGEADRAHGTSMSCAIPGRRAVTIKQPIGVAAALVPWNFPIALALRKAAAALAAGCTMVVKPSPETPLTCVSIAHLALEAGFPRGALNVVTTSLENTPTVAEALCLDARVKKVSFTGSTRVGKIIASFCAPNLKKTTFELGGNCPFIVFDDADVGQAVSQLMPLKWRHAGQACITSNRVFVHSSIYDTFVEKVVQETRGLKLGHGMEEGSTMGALTTPRGLDKAEELYQDAISKGAKTVLGTGKREEGQGYFMAPTILTEMEDDMLMTHEEIFAPVLGFYRFESEEEVVQRANDTPLGLASYIFTKNVDRLWRLFENLDAGMIGLNAGNSSSAEAPFGGIKDSGHGKESGKDVAIDEFLITKTATLTIDGHY

SEQ ID NO: 161 - DNA, 1446 bp, Gibberella zeae PH-1
  CDS (1)..(1446)
atggccgtcggatctagcaaacaaatcaacttcaccgagttctacaacctcatcgacggaaagctcgaaaccaccaaggagacgcttcagaacaccaacccttctacactcgagaagaaccacccagcgccggttgcgacccaagaagatgttgacagagctgtagaggctgccaagaaggcctctgaatcctggtctgaggtcccatgggaggagcgacaggccctagtaaccaagtatgccgagggtattgatgctctcaaggatgaatttgctcacttgctggtcaaggagcaaggaaaatctctggcaatggcccacttcgagatcatgttgtctgttcagttcctcaagggatacgcatcactgcctgaccctcagcgggtgattgaggacaagccagactgtaaggtcgtcacaaaatacgttcctctcggtgttgcagtcggcatcgtgccttggaacttccctattttcttgaccactgccaagatcggcccagctctaatcgccggtaactctttcattctcaagccctcacctttcactccttactgcggattgaagctcgctgagttggcttcccagtacttcccctcaggtgtcgttcaagcactcagcggtgacgataatcttggaccctggcttaccgcccaccccggcgtggacaagatcagctttactggatctacagcaactggaaagaaggtcgtagcaagcgctgcaccaacgctcaagcgcgtcaccctcgaactgggtggtaacgatccctccattgtctgcgatgacgttgatgtcaaggaggttgctcccaagattgccttcgcagcgctcatgaactctggtcagctctgcatggccattaagcgagtttacgtccacgagtccatctatgacgactttgtgaaagagctagccgcagccgttaacagctttactgtcggtgatggtatggatgaaaagacatctctgggtcctgttcagaaccagatgcagtttgatagagttaagaacctactcgccgatatcgagtccaacggttacaagctagcagctggctcgaccagtgcctcaactgctggcaagggatactttatcacccctaccatcgttgagaacccccccgatgagtctagaattgtggtcgaggaaccattcggccctgtctttcctgtcttgaagtggactgatgaagcggatgtcctccgacgtgccaacgataccgatatgggtcttagtgcttctgtttggactaaggacatggagaaggccgagagactgtcctccaaaatcaaggcaggtacagtttgggttaacaatcacgttcagcttaaccctgctgttccctttggtggtgctaagcacagtggtcatggtgctgagcatggtattgagggtattaaggcatactgcactactaagtctctatactttaacaaggcttaa

SEQ ID NO: 162 - protein, 481 aa, Gibberella zeae PH-1
MAVGSSKQINFTEFYNLIDGKLETTKETLQNTNPSTLEKNHPAPVATQEDVDRAVEAAKKASESWSEVPWEERQALVTKYAEGIDALKDEFAHLLVKEQGKSLAMAHFEIMLSVQFLKGYASLPDPQRVIEDKPDCKVVTKYVPLGVAVGIVPWNFPIFLTTAKIGPALIAGNSFILKPSPFTPYCGLKLAELASQYFPSGVVQALSGDDNLGPWLTAHPGVDKISFTGSTATGKKVVASAAPTLKRVTLELGGNDPSIVCDDVDVKEVAPKIAFAALMNSGQLCMAIKRVYVHESIYDDFVKELAAAVNSFTVGDGMDEKTSLGPVQNQMQFDRVKNLLADIESNGYKLAAGSTSASTAGKGYFITPTIVENPPDESRIVVEEPFGPVFPVLKWTDEADVLRRANDTDMGLSASVWTKDMEKAERLSSKIKAGTVWVNNHVQLNPAVPFGGAKHSGHGAEHGIEGIKAYCTTKSLYFNKA

SEQ ID NO: 163 - DNA, 1476 bp, Candida glabrata CBS 138
  CDS (1)..(1476)
atgaaaccagaattgaaaaatccagacctaatcaaaggcctcggttacattaacggtgaatgggtaaaggatagtaatgaattctttgaagttgatgatccatccactggtgagatcattgctaaattgccagaacatgatattgcagttgtagatagagctgtcgatgccgcatatgatgcctttcagaagtacaagaacactctacccagacagcgtgctacttggctaagaaacttattcaatttaatgactgaaaatgctgaggatctagctaagattattacttgggaaaacggtaagtcacttcctgattcccgcgctgaaattaagtacgctgcttcttattacgagtggtacgcagaagaggctcctagaatatatggggcaactattcaaccttcaatcccaaataatagagttattaccaaaaggcaaccagttggagtttgtggtataatttgtccttggaatttcccaagtgccatgattacgagaaaagttggtgctgctctagctgctggctgtactgttgttgttaaacctgattcacacacaccactttccgctcttgcaatgacagtattggttgaaaaggccggattccctaaaggagtattcaatgttgttttatctcaacacaataccccaaaattggggaaaagattatgtgagcatcctaaggttaaaaaggtgacctttactggttcgactagaatcggtaaaacattaatggagcaagcctcttcaaccttgaaaaagtgctcctttgagctagggggtaacgcaccttttatagtttttgatgatgctgacctcgacttggcggttgatcaagcaattgcatcaaagttcaggggtatgggtcaaacttgtgtttgtactaacaggttttatgttcaggatacaatagctgacgaatttgccgagaagttggttactaaagttaaacagtttaagataggagatggtatgaaggaaggtgttactcatggctgtttaactaatgcaaagcaagctgataaagtcgacgaacacaaaaaggatgcaattgaaaaaggagctaaggttttgctcgagggaggtcgtatgccagatttaggtaagaacttctacgctcccgtggtgttaaagaatgtcccacaatcagctatggtggctaaggaagaaacttttggtcctttgtgtccaatctttacatttaaaaccgttgaagaagttcttggttatgctaacgatactgaattaggacttgcttcatacgtttttactaagaatgtcaatacgttattcaccgttagtgaagctcttgaagcaggtatggtttcatgtaatacaggattgttttctgacagctcagttccattcggtggtgttaaagaatcagggtttggtagagagggttcactttatggtattgacgattatactacggttaaaagtataataattggaaatttaccagatagtttatag

SEQ ID NO: 164 - protein, 491 aa, Candida glabrata CBS 138
MKPELKNPDLIKGLGYINGEWVKDSNEFFEVDDPSTGEIIAKLPEHDIAVVDRAVDAAYDAFQKYKNTLPRQRATWLRNLFNLMTENAEDLAKIITWENGKSLPDSRAEIKYAASYYEWYAEEAPRIYGATIQPSIPNNRVITKRQPVGVCGIICPWNFPSAMITRKVGAALAAGCTVVVKPDSHTPLSALAMTVLVEKAGFPKGVFNVVLSQHNTPKLGKRLCEHPKVKKVTFTGSTRIGKTLMEQASSTLKKCSFELGGNAPFIVFDDADLDLAVDQAIASKFRGMGQTCVCTNRFYVQDTIADEFAEKLVTKVKQFKIGDGMKEGVTHGCLTNAKQADKVDEHKKDAIEKGAKVLLEGGRMPDLGKNFYAPVVLKNVPQSAMVAKEETFGPLCPIFTFKTVEEVLGYANDTELGLASYVFTKNVNTLFTVSEALEAGMVSCNTGLFSDSSVPFGGVKESGFGREGSLYGIDDYTTVKSIIIGNLPDSL

SEQ ID NO: 165 - DNA, 1515 bp, Candida glabrata CBS 138
  CDS (1)..(1515)
atgcctgaagttttcgaagagattaatatcccccaaattgggcgcagttacaaacaacctattggtatatttattgacaatgagtttgtgccatcttctaatggtgaaaagattgaaacaataaatccagctactgaagaagtgattacttctttctatgctgctactgaggatgatgttgacaaggcagtcaagtctgcaagagaatcatatgagaatgtttggtttaagatatcacctgcggagaagagggatatgctattaaaattggcggacttaatagaggaggagaaacctttattagctgctttggagacattggatgctggtaaaccttatcataccaacgctatggatgatattgaccaaatcatccatttaacaaaatattttgcaggtgctactgataaatttactcaaggaaagacaattcccatcgatcatgagaaattggtgtacacccttaaatcgccttatggtgtgtgcggtatgattatcccatggaactatcctttggcaatggctagctggaaaatgcaaggctgtttagctgctggtaacacgctagttatcaagcctgctgagaatacatcactctctttgctatacttggcgcaattgttcaagaaagcaggttttccaaaaggtgttgtgaatgttgttcctggtaagggatctgtagttggcaattctttaggtttacatatggatgttgacaaaatatcttttacaggcagtaccaaggtgggaagctctattcttgaacttgcaggcaagtcaaacatgaaagatgttaccttggaatgtggtggtaagagccccgctgtagtttttcaggatgctgacattgataatgcaattgaatatattgctaacggtatcttctataactcgggccaaaactgcactgctaattcaagagtttatgttcaggaagatatttatgatgactttataaagagattcacagaacataccaaagaaaactggaagtttggttcgaaatgtgatccatttgataaagattgcacagtgggtcctgttgtgtcagagaagcaatttgagacggtgaatgattatattaggcatggaaaggaggaagaaaacctacagattcaccaaactgttgagaaatgtgattgcaagggttattttatttctccaacaatttttactgatgtccctcagggatctaaattgatgaaagaagaaatcttcggtccagttgttgtagtcgccaaattcaaagattacaaagaagcaataaaattggccaatgatacaaattatggtttagcctctatggtcttcactaagaacatttctgttgctaattggtttgctagggacattaaatcaggtactgtgtggatcaactcgtccaatgaagaagatcctacggtgccatttggtggtttcaagcaaagcggtataggtcgtgaactgggtgaaactggtgtggaatcatacatgcaaataaagacggtgcatttaaacatgtcagagaagatttga

SEQ ID NO: 166 - protein, 504 aa, Candida glabrata CBS 138
MPEVFEEINIPQIGRSYKQPIGIFIDNEFVPSSNGEKIETINPATEEVITSFYAATEDDVDKAVKSARESYENVWFKISPAEKRDMLLKLADLIEEEKPLLAALETLDAGKPYHTNAMDDIDQIIHLTKYFAGATDKFTQGKTIPIDHEKLVYTLKSPYGVCGMIIPWNYPLAMASWKMQGCLAAGNTLVIKPAENTSLSLLYLAQLFKKAGFPKGVVNVVPGKGSVVGNSLGLHMDVDKISFTGSTKVGSSILELAGKSNMKDVTLECGGKSPAVVFQDADIDNAIEYIANGIFYNSGQNCTANSRVYVQEDIYDDFIKRFTEHTKENWKFGSKCDPFDKDCTVGPVVSEKQFETVNDYIRHGKEEENLQIHQTVEKCDCKGYFISPTIFTDVPQGSKLMKEEIFGPVVVVAKFKDYKEAIKLANDTNYGLASMVFTKNISVANWFARDIKSGTVWINSSNEEDPTVPFGGFKQSGIGRELGETGVESYMQIKTVHLNMSEKI

SEQ ID NO: 167 - DNA, 1494 bp, Candida glabrata CBS 138
  CDS (1)..(1494)
atggcttacaagactgctgctactaaaaccattaagctaccaaatggtctaacctacgaacagccaactggtctgttcattaacaatgaatttgttgaatcctccgatggtaagacaatgaccatcgagaatccatctacacaagagccaattgtcgatgtcttctccgctactaaagaagatgttgactacgctgttgactgtgctgaaagagcttttgaaaagagtgactgggctactcaagacccaaaggttagagcccgttatttgagcaagctagctgacctaatggaagaacaactggaacttattgcctccattgaaaccttggataacggtaagacaattgctctatcccgtggtgatgttcaactatctattaactgtatcagagatgctgcctcatatgccgataaggtcgacggtagaagtattgacactggtgatggctacatgaactacaccatcagagaaccaattggtgtctgcgcacaaattatcccatggaacttcccactgatgatgctatcatggaaagtcggtccagccttggccatgggtaactgcattgtcctaaagccagcttctgccactccattaaatgctctatatttctcttctctatgtaaacaagttggtattccagctggtgttgtcaacattatcccaggtccaggtggtatggttggtactgctctaaccactcatccaaaggtcagaaaggtggctttcactggttctaccgatattggtaaggatattgctgtcaaggcttctgcttctaatttgaaaaagattactttagaattgggtggtaagtctgctcatttggtcttcaacgatgctaacctagaaaagaccttgccaaacttggttaatggtattttcaagaacgctggtcaaatctgctcttcaggttccagaatatacgctcaagcaggtatttacgacagattactaaaggagttcaaggcctacatcgaaaagaacattaaggttggtaacccattcgatgaatctaacttccaaggtgcaatcactaacaaagaacaatacaacaccattttgaagtacatcaacatcggtaaagaagaaggtgcaaaggttcttactggtggtgaaactgctgccgagaaaggttacttcatcaagccaactgtcttctacgatgtcaaggaagatatgagagttgtcaaggaagaaatttttggtccatgtgttacaatctcaaagttcgaagagatcgaagatggtgttgccatggccaatgactctgaattcggtctaggtgctggtattgaaactgaaaacttgagcactgctttgaaagtggctaagatgcttcactctggtactgtctggattaacacatacaacgactttgactccagagttcctttcggtggttacaagcaatctggttacggtagagaaatgggttctgaagtatacgaatgttacacccaaaccaaggctgtcagaatcaagttataa

SEQ ID NO: 168 - protein, 497 aa, Candida glabrata CBS 138
MAYKTAATKTIKLPNGLTYEQPTGLFINNEFVESSDGKTMTIENPSTQEPIVDVFSATKEDVDYAVDCAERAFEKSDWATQDPKVRARYLSKLADLMEEQLELIASIETLDNGKTIALSRGDVQLSINCIRDAASYADKVDGRSIDTGDGYMNYTIREPIGVCAQIIPWNFPLMMLSWKVGPALAMGNCIVLKPASATPLNALYFSSLCKQVGIPAGVVNIIPGPGGMVGTALTTHPKVRKVAFTGSTDIGKDIAVKASASNLKKITLELGGKSAHLVFNDANLEKTLPNLVNGIFKNAGQICSSGSRIYAQAGIYDRLLKEFKAYIEKNIKVGNPFDESNFQGAITNKEQYNTILKYINIGKEEGAKVLTGGETAAEKGYFIKPTVFYDVKEDMRVVKEEIFGPCVTISKFEEIEDGVAMANDSEFGLGAGIETENLSTALKVAKMLHSGTVWINTYNDFDSRVPFGGYKQSGYGREMGSEVYECYTQTKAVRIKL

SEQ ID NO: 169 - DNA, 1554 bp, Candida glabrata CBS 138
  CDS (1)..(1554)
atgttctcccgtactattaccagaactctacgtgctcctgcggtgctacgtttgtactcaactaacgttccattggaagtaccagttactttgccaaatggtatcaagtatatgcaaccaaccggtctgttcatcaacggtgagtttgtgaagtcacacgagggtaagaccttcgatgtgctgaacccatctaccgaagaaacgatcgctacgctatatgaagcccaggctgccgacgtcgacatcgccgtcaaggccgctaaggaggccttcgagaaccactggtccagagaagaccctgaagtgcgtgccagagctttgttcaacttggccgacttagtcgaagctaacttggaaactttggccggtatcgactctctagacaacggtaagtccctgctgtgttcccgtgccgatgtcgcgctagtggccaagtacttgcgttcctgtggtggttgggctgataagatctacggtgacgttatcgacaccggtaagtcccacttcacttactccgtcaaggaaccattgggtgtctgtggtcaaattatcccatggaacttcccattgttgatgtggtcctggaagatcggtccagctttggccaccggtaacaccgtcgttctaaaacctgccgaattgactccattgtccgcccttttcgcttccaaactttgccaagaagctggtatcccagctggtgtagttaacattatcccaggtccaggtaaaaccgtcggtgaaagaatctgtacccaccctgacatcaagaaggttgcattcactggttctaccgctactggttcccgtatcatgaagaccgccgctgacagcatcaagaaggttactcttgaactgggtggtaagtctccaaacatcgtcttcgctgatgctgacttggaacaagctgttgaaaacattgcccatggtattttcttcaactctggtgaagtctgttgtgccggttctagaatctacgttcaagataagtgttatgacgaagtcttggacagattaaagaagtacactgaaagcttgaaggtcggtaacccattcggtgacaacacttaccaaggttctcaaacttcccaacaacaattagacaagattttggaatacgtcgacattggtaagcaagaaggtgccagaattgtcaccggtggtgaaagaatcggtgagaagggttacttcttcaagccaaccgtcttcgccgatgttaaggaaaacatgcgtattgtcaaggatgaaatctttggtccaatcgtcaccgtctcccagttctccactgttgacgaggttatcgccatggctaacgactcccaatacggtctagccgccggtatccacaccaacgatgtcaacaaggccgtcgaagtctccagcagattgaaggccggtaccatctggatcaacacttacaacgcattccaccaaaacgttccattcggtggtttcggtcaatctggtattggccgtgaaatgggttctgccgccttggacaactacactcaagtcaagtctgtcagaatggccatcaccaagccaagagtctaa

SEQ ID NO: 170 - protein, 517 aa, Candida glabrata CBS 138
MFSRTITRTLRAPAVLRLYSTNVPLEVPVTLPNGIKYMQPTGLFINGEFVKSHEGKTFDVLNPSTEETIATLYEAQAADVDIAVKAAKEAFENHWSREDPEVRARALFNLADLVEANLETLAGIDSLDNGKSLLCSRADVALVAKYLRSCGGWADKIYGDVIDTGKSHFTYSVKEPLGVCGQIIPWNFPLLMWSWKIGPALATGNTVVLKPAELTPLSALFASKLCQEAGIPAGVVNIIPGPGKTVGERICTHPDIKKVAFTGSTATGSRIMKTAADSIKKVTLELGGKSPNIVFADADLEQAVENIAHGIFFNSGEVCCAGSRIYVQDKCYDEVLDRLKKYTESLKVGNPFGDNTYQGSQTSQQQLDKILEYVDIGKQEGARIVTGGERIGEKGYFFKPTVFADVKENMRIVKDEIFGPIVTVSQFSTVDEVIAMANDSQYGLAAGIHTNDVNKAVEVSSRLKAGTIWINTYNAFHQNVPFGGFGQSGIGREMGSAALDNYTQVKSVRMAITKPRV

SEQ ID NO: 171 - DNA, 1545 bp, Kluyveromyces lactis NRRL Y-1140
  CDS (1)..(1545)
atgctaggacgtactcaagttacaaccctaagacgtttcatcagattatactcccaattaccattgaaggtcccagttcaacttccaaatggtatcacatacgagcaaccaactggtctattcatcaatggtgagtttgtgccatctagacaacacaagacttttgaagtgttgaacccttccaacgaagaagaaattacccatatttatgaagcacgtgaagatgacgtggatatcgctgtcgctgcagctaaaaaagccttcaacaacggttggtctactgctgaaccagaagatagagctaaatgtttgctgaagttggctgatttgattgaccaacatgcagagactttggcttctatcgaatctttggataacggtaaatccctattttgctcacgtggtgatgtggcgctagttgccaaatacttaaggtcatgtgccggttgggctgataagatttatggtaaggttatcgatactggcgctgaccatttctcatacaccaagagagaaccattgggtgtatgtggtcaaattatcccatggaatttcccactattgatgtggtcctggaaagttggtccagctttggctaccggtaacactgtggtgttgaaacctgctgaagcaactccattgtctgctctatatgcatgccaattggtgcaagaagctggtgtaccaaagggtgttgttaacatcatcccaggtttcggtaaaatcgtcggtgaaagaatttgtacccatcctgacatcaagaaggtcgctttcactggttccactgctactggtcgtcacattatgaaaacttgtgccgattccatcaagaaggtcactttagaacttggtggtaagtctccaaatatcgttttcggtgatgctgacttggataaagctgttaagaacattgcttttggtatcttctacaactccggtgaagtctgttgcgcaggttcaagaatttacgttcaagatactgtttacgaagaggtcttagaaaaattcaagcaatacgctgaatctctaaaggtcggtaatccattcgaagaaaacgttttccaaggtgctcaaacttctcaaatgcaaattgacaagatcttatcctatgttgatgtcggtacttctgaaggtgctcgtgtcatcactggtggtgaaagaatcggtaacaagggttactttatcaagccaactatctttgctgatgttaaagaagacatgcaaattgttaaggaagaaatctttggtcctgttgtaacagtctctaagttcactaccgttgacgaagtcgtcgctaaggctaacgactctgaatatggtcttgctgccggtattcacactaaggatgttaacaaggctattgacgtttccaacagagttaaggccggtaccgtctggattaacacctacaacaacttccatcaaaatgttccattcggtggtttcggccaatccggtatcggtagagagatgggtgctgaagctttagataactacacccaaacaaaggctgtcagaatggccattgaccacccaaactattaa

SEQ ID NO: 172 - protein, 514 aa, Kluyveromyces lactis NRRL Y-1140
MLGRTQVTTLRRFIRLYSQLPLKVPVQLPNGITYEQPTGLFINGEFVPSRQHKTFEVLNPSNEEEITHIYEAREDDVDIAVAAAKKAFNNGWSTAEPEDRAKCLLKLADLIDQHAETLASIESLDNGKSLFCSRGDVALVAKYLRSCAGWADKIYGKVIDTGADHFSYTKREPLGVCGQIIPWNFPLLMWSWKVGPALATGNTVVLKPAEATPLSALYACQLVQEAGVPKGVVNIIPGFGKIVGERICTHPDIKKVAFTGSTATGRHIMKTCADSIKKVTLELGGKSPNIVFGDADLDKAVKNIAFGIFYNSGEVCCAGSRIYVQDTVYEEVLEKFKQYAESLKVGNPFEENVFQGAQTSQMQIDKILSYVDVGTSEGARVITGGERIGNKGYFIKPTIFADVKEDMQIVKEEIFGPVVTVSKFTTVDEVVAKANDSEYGLAAGIHTKDVNKAIDVSNRVKAGTVWINTYNNFHQNVPFGGFGQSGIGREMGAEALDNYTQTKAVRMAIDHPNY

SEQ ID NO: 173 - DNA, 1506 bp, Kluyveromyces lactis NRRL Y-1140
  CDS (1)..(1506)
atgtcattgtacgaaacggttaacattccacagttgaacattacatatgagcagccattggggttgttcatcaacaacgagtttgtcaagtccagtgacggtaagaaaattgaaagcatcaacccaagtactgaggaatcgattgtctctttttttgcagcttctgaaaaagatgtcaatagtgctgttacagcagcaagagatgcttttgaaaacaattggtccaagacatcaggcgaacagagaggaattcttttgtcgaagttatttgatttgattgagagagataagttattgctagctgcgattgagacgttagattcggggaagccttaccactctaatagtcttgctgatcttgaacaaatcttgcaattaactcgttactatgctggcggtgctgataagttcaccggaggggaatatattccattaaaccaagacaagtatgcgtataccatgaaggtaccttatggtgttgttgcacaaattgttccatggaattatcccttggctatggctagctggaaaatccaatcgtgtttggctgctggtaacactattgttatcaagccagcagagaacacttctttgtctttgctttacttcgcacaacttgtcaaagaggctggctttcctccaggtgtgttgaatatcttaccaggttatggttccgttacgggaactgcaatggctagccacactgacatagacaagattgcgtttactggttcgaccgctgttggacaaaaagtcatgtcacttgctgcccaatcaaacttgaaagctgttactttggaatgcggtggtaagtctccatgtctaatttttgctgatgccaaccttgatgaagccattccttgggttgctggaggtatcttctataactcagggcagaattgtacagcaaactcgaggatctacgtccacgaggatatttacgaagagtttttaactaaatttgaagaatacgctaaatcaaactggaagttcggagctaaattcgatcctttcgataaagactgtactctagggcctgttatttcaaaagtccaatatgatcgtatccaatcctatgttgaacatggtaaagcctctgagaaactaggcttcaaggagtttgccgaatatccttctaagggttattttatcccacctactatattttcagatgttccaaactcttcgaaactctctcaagaagaaatttttggaccggtgggtgttgtggcatcattttcaacttatgaggaagccatcaagttggcaaatgactcctcttacggtttggcttcttgtgttttctctgaaaatgcccgaacaacagcacaatttgctcgcgatattagggcaggtaccgtttggatcaattcttccaatgacgaagaaatttctgttccatttggtgggttcaaaatgtccggtattggtcgtgaattggggcgtaacggtgttgactcttatttgcaaacaaaagctgttcacgtaaatattgcaaagctgtga

SEQ ID NO: 174 - protein, 501 aa, Kluyveromyces lactis NRRL Y-1140
MSLYETVNIPQLNITYEQPLGLFINNEFVKSSDGKKIESINPSTEESIVSFFAASEKDVNSAVTAARDAFENNWSKTSGEQRGILLSKLFDLIERDKLLLAAIETLDSGKPYHSNSLADLEQILQLTRYYAGGADKFTGGEYIPLNQDKYAYTMKVPYGVVAQIVPWNYPLAMASWKIQSCLAAGNTIVIKPAENTSLSLLYFAQLVKEAGFPPGVLNILPGYGSVTGTAMASHTDIDKIAFTGSTAVGQKVMSLAAQSNLKAVTLECGGKSPCLIFADANLDEAIPWVAGGIFYNSGQNCTANSRIYVHEDIYEEFLTKFEEYAKSNWKFGAKFDPFDKDCTLGPVISKVQYDRIQSYVEHGKASEKLGFKEFAEYPSKGYFIPPTIFSDVPNSSKLSQEEIFGPVGVVASFSTYEEAIKLANDSSYGLASCVFSENARTTAQFARDIRAGTVWINSSNDEEISVPFGGFKMSGIGRELGRNGVDSYLQTKAVHVNIAKL

SEQ ID NO: 175 - DNA, 1512 bp, Kluyveromyces lactis NRRL Y-1140
  CDS (1)..(1512)
atgtcctttaccagcatcaaactagcagatggtactgagtaccaacaacctttaggtttattcattaacaatgaatatgttgaagcacatggttcggagactttaacatcatataacccaagttctggtgaagaaatctgcaaagttcaatgtgcagacccaaagattgatgtcgatttggctgttaaggctgcaagagacgcttttcctggttggaaagcgactccagctatagaaaagagagacttgttctacaaattggccggcttgttggaaagagatattgacatattaagtaaaatcgagtccctggacactggaaagccaattgccaacaatgccaagtacgacatactagaagtggttgaggtcttaaagtactatgctggatggatcgataaggcaggtggtcaatctttcgctccaagcagtgaaaagttagcttatactttacatcagccattaggcgtggttggatgtattatcccattcaactatccattggctatgatgtcttggaaatggactgctatcgccactgggaacacaactgtttttaaatctgcggatcagactccattatccatcctatatttcgccaaattggtgaaggaagcagggttccctgcaggtgttttcaatgtcttatccggtacaggtgcctctgttggtagtgccattgttaaacacactggtgtagacaagattgcattcacaggttccactgcagttggtcaaattatccaacaacaatctgcagtaaacttgaaacctatcacattggaatgtggtggtaaatctgcgaacatgatctttgaagattgtgatttagaacaggccgtgaaatggagtgcatggggtattttcaacaatatgggtcaaatctgttccggtacttcaagagtcttcgtgcaagaatctatttacgaggaatttgtagcacaattggctgaccatgtcaagaaaacttatatcgtgggtgctccttcagatgatgccgtcatcgtcggacctcaagtctccaaaaaacaacaagaacgtgtccttgaatacattaagatcggtatcgaagaaggatgcaaagtgccattgggtggtcttggagcacctgagccaattgcgaatgatccagcattagctaacggttactacgtcaagccaaccattttagcagatgtcaaagcgtcgtacagaatcgccaaggaagaaatctttggtcccgtcatagtcgtaggctctttcaaggactacaaagaagctttagacattgccaacgattcagactacggtcttggttcggcaattttctcaaaagacatcgtaacatgtcacaaatttgcccaggacgtggaagcaggtatggtctggatcaactcttctaacgatgttgacatcaacgtcccattcggtggtgtaaaaatgtccggtcatggccgtgaattaggtgaatacggtttagctaacttcactaacgttaaatcagttcatgttaacctaggaagaaagttgtaa

SEQ ID NO: 176 - protein, 503 aa, Kluyveromyces lactis NRRL Y-1140
MSFTSIKLADGTEYQQPLGLFINNEYVEAHGSETLTSYNPSSGEEICKVQCADPKIDVDLAVKAARDAFPGWKATPAIEKRDLFYKLAGLLERDIDILSKIESLDTGKPIANNAKYDILEVVEVLKYYAGWIDKAGGQSFAPSSEKLAYTLHQPLGVVGCIIPFNYPLAMMSWKWTAIATGNTTVFKSADQTPLSILYFAKLVKEAGFPAGVFNVLSGTGASVGSAIVKHTGVDKIAFTGSTAVGQIIQQQSAVNLKPITLECGGKSANMIFEDCDLEQAVKWSAWGIFNNMGQICSGTSRVFVQESIYEEFVAQLADHVKKTYIVGAPSDDAVIVGPQVSKKQQERVLEYIKIGIEEGCKVPLGGLGAPEPIANDPALANGYYVKPTILADVKASYRIAKEEIFGPVIVVGSFKDYKEALDIANDSDYGLGSAIFSKDIVTCHKFAQDVEAGMVWINSSNDVDINVPFGGVKMSGHGRELGEYGLANFTNVKSVHVNLGRKL

SEQ ID NO: 177 - DNA, 1494 bp, Kluyveromyces lactis NRRL Y-1140
  CDS (1)..(1494)
atggctggtatcactggtattactccggagttcaagaactcagatttgatccgtaaaggtgcatttgttgatggccaatggcttgagactgcttcagaaacgtttaatgtgactgatccagctactttggaagttatcgctactttgccagatcaatccattgaagttatccatgaagccatcgatagtgctgcagaagcgttccgtttgtttaagaaaactacaccaaagaccagatctacatggttgcgtaacttgtacaatttgatgatggaaaacgtcgacgatttggcaaagattattacttgggaaaatggtaaggctctatccgaagctcaaggtgaagttaagtatgcagcatcttatttcgaatggtatgctgaagaagcagttagaatgtatggtactactattcaaccgaataatggatccaatagagctttcaccgttagacaaccagttggtgtctgtggtatcatttgtccatggaatttcccaagcgctatgattaccagaaaggccggtgctgcattggcagctggttgtaccgtggtcgtgaaaccagattctcaaactccattgtccgctttggctttggctcatttggctgaaaaagctggtttccctaaaggtgttttcaacgtcgtattgactgctaccagaactccagaattcggtttggctctatgtgaatctccaaaagttaagaagatttcgttcactgggtcgaccaacgtcggtaagatcttgatgaaacaaagtgcatctactatgaagaaattgtcctttgaattaggtggtaatgctccggtcattgtcttcgacgatgctgatttggagcaagccgttactcaaactattttgtccaaatttagaggcctaggtcaaacttgtgtgtgcgctaacagaatctatgttcaacgtaccatcattgattcatttgctgaaaaattggctaaacaagtgaacgagttcgtcattggccatggtttggactctaagactactcacggatgtctaattaatgaaaatgctataaagaaagttgaagctcatgtaaaggacgccttggaaaagggtgcaaagaccgtcgttgctggtggtcgtttgccagaattaggtccaaacttctacgctccaaccgtactatctcatgttccatccacggctgtggttaataaagatgagactttcggtcctctctgtgccttgattccattcgataccatggaagaagtcgtaggatatgctaacgatactgaattgggtctagcatcatacgtgttctctaagaacattgataccgtatacaccgttgctgaagctttggaaaccggtatggtctcatgcaacactggtttgttcagtgagtgtaccattccattcggcggtgttaaggaatccggattcggtagagagggatctttgcacggtattgaagactatactgtcatcaagactatcaccatcggaaacttgcctgctccactataa

SEQ ID NO: 178 - protein, 497 aa, Kluyveromyces lactis NRRL Y-1140
MAGITGITPEFKNSDLIRKGAFVDGQWLETASETFNVTDPATLEVIATLPDQSIEVIHEAIDSAAEAFRLFKKTTPKTRSTWLRNLYNLMMENVDDLAKIITWENGKALSEAQGEVKYAASYFEWYAEEAVRMYGTTIQPNNGSNRAFTVRQPVGVCGIICPWNFPSAMITRKAGAALAAGCTVVVKPDSQTPLSALALAHLAEKAGFPKGVFNVVLTATRTPEFGLALCESPKVKKISFTGSTNVGKILMKQSASTMKKLSFELGGNAPVIVFDDADLEQAVTQTILSKFRGLGQTCVCANRIYVQRTIIDSFAEKLAKQVNEFVIGHGLDSKTTHGCLINENAIKKVEAHVKDALEKGAKTVVAGGRLPELGPNFYAPTVLSHVPSTAVVNKDETFGPLCALIPFDTMEEVVGYANDTELGLASYVFSKNIDTVYTVAEALETGMVSCNTGLFSECTIPFGGVKESGFGREGSLHGIEDYTVIKTITIGNLPAPL

SEQ ID NO: 179 - DNA, 1569 bp, Kluyveromyces lactis NRRL Y-1140
  CDS (1)..(1569)
atgttattacgtactaccactgctggtactagactagctttcaagtcacaaactgcggcattcgcacatgctttacgttactattcgcatttaccattgaaggtcaaggttgatttgccaaatggtatttcatacgaacaaccaactggtttgttcatcaataaccaatttgttccttccaagcaagggaagacttttgaagtgttgagtccttcaaccgaagaagaaattactcatgtttacgaaggtcgggaggaagacgtggatgcggctgttgaggctgcagacaaagctttcaagtccggtgtctggtctaaggttgacccactagtcagatctcagtgtttgagcaagttagctgattacattgaaaaggatttggataccattgcttctatcgaatctctggacaatggtaaagctatctcatctgctaaaggtgatgttcaactagttgttaactacctaagatcagctgctggctacgctgataaggtggatggtagagtcattgatactggttcgactcatttctcttacacagttagagaaccattaggtgtctgtggtcaaattatcccatggaacttcccattgttgatgtgggcttggaagattgctccagctcttgctaccggtaatactgttgtcttgaagaccgctgaatccacacctttgtctgcactatacgtttctcaatacattccaaaagcgggtatcccagacggtgttgtgaacatcgtttctggtttcggtaaaattgttggtgaggctattacaactcatccaaagattaagaaggttgcattcactggttccactgctactggtcgtcatatctaccaaaatgccggtgtcaatttgaagaaggtcacattggagctaggtggtaagtcaccaaacgttgttttcgctgatgcaaacttgaaatccgctgttcaaaactctttgttgggtatctactataactccggtgaagtctgctgtgctggttccaggttgtatgttgaagaatctatttatgacgatttcttgaaggaaattaagtctgcttcagaagctctaaaggttggtgatcctttcgatgcagaaactttccagggtgctcaaacttcgcaaaatcaattggacaagatcttgaaatatgtggagattggtaagaatgaaggtgctactttaattactggtggtgaaagaattggtgacaagggttactttgttagaccaactattttcgctgatgttgaagaaagcatgagaatcgttaaggaagaaatcttcggccctgttgtcactgtcaccaagtttaaaaccattgatgaattgattgaaaaggccaacgactctgaatatggattggctgcaggaattcacacatctaacatcaatactgccatccaggtttcaaacagattgaatgctggtaccgtctggattaacacatacaacgacttccaccactgtgttccgttcggtggtttcaatgcttctggtattggtagagaaatgggttctgaagctctagacaattacactcaagtcaaggctgtccgtgttaaattggagtaa

SEQ ID NO: 180 - protein, 522 aa, Kluyveromyces lactis NRRL Y-1140
MLLRTTTAGTRLAFKSQTAAFAHALRYYSHLPLKVKVDLPNGISYEQPTGLFINNQFVPSKQGKTFEVLSPSTEEEITHVYEGREEDVDAAVEAADKAFKSGVWSKVDPLVRSQCLSKLADYIEKDLDTIASIESLDNGKAISSAKGDVQLVVNYLRSAAGYADKVDGRVIDTGSTHFSYTVREPLGVCGQIIPWNFPLLMWAWKIAPALATGNTVVLKTAESTPLSALYVSQYIPKAGIPDGVVNIVSGFGKIVGEAITTHPKIKKVAFTGSTATGRHIYQNAGVNLKKVTLELGGKSPNVVFADANLKSAVQNSLLGIYYNSGEVCCAGSRLYVEESIYDDFLKEIKSASEALKVGDPFDAETFQGAQTSQNQLDKILKYVEIGKNEGATLITGGERIGDKGYFVRPTIFADVEESMRIVKEEIFGPVVTVTKFKTIDELIEKANDSEYGLAAGIHTSNINTAIQVSNRLNAGTVWINTYNDFHHCVPFGGFNASGIGREMGSEALDNYTQVKAVRVKLE

SEQ ID NO: 181 - DNA, 1515 bp, Kluyveromyces lactis NRRL Y-1140
  CDS (1)..(1515)
atgttccgcaactcgaataccctaagaacgctaaacctattaagaaagatgtcttctaaaattgagaacgattatttgatacaaaccaaggcctttatcaacggtaaatggacagaaactgacgacaagtttgctgtaaccaatccctccaccggtgatacgatccgtgaggttacgaactgcggtgtttcagattttaacaaggctatcgaaattgcccatgatgcattcgggacgttcagacagaccaacgtcagagagcgcgcgcagatcttggacaatatatacaacttgatgctagagaacaagcaggatctagccaaaatcttaactttggagaacggtaaaccgtacaaggactcactaggtgagattgtgtactctgcaatgttcttcaaatggtttgctgaagaggctccaagaatttatggagatattattccaagtgctgtatccagtgaccaaaagatctttacaataagacaaccattgggtgttattggtattctaactccgtggaatttccctagcgcaatgattgctagaaagttagcaccagtcattgctactggtaatacatgtgtcatcaaacctgctcatgaaactccgttgagtgcattggcgttaggggtgatcgcagagaaagccggtcttcctgcaggtgtatgcaatatcttaccaactaatcacacaagtgaaataggtgaatacgtttgcgaacatgaattggtcaagaagatcactttcactggctcaactaaaatcggtcaattgttaatgggacaatcaagcaagggaaagaatatcaagaaattctctatggaattggggggtaatgcaccatatatcgtcttcaaggacgctgacttagaccgtgccttagatggaataatcggatgtaaattcagacaatccggacaaacttgtatctgtgcaaacagaatctttgtgcatgaagatctttacgatgaattcagtaagaggttggttgataagatcgacaaaacctttaaattaggcgatgggttccaagacggtgtcactcacggtccattgatccatgacaaatccattgacaaagtcgcatctttagttcaggatgcaaaaacgaagggagcagacgtcttgataggtggctcaagagctagttctttaggtccattattctaccaaccaacagtacttggtaatgtaaccgagtccatggatatattttatgaagaaatctttggacctgttgctccattaattaagtttaaggatgtggatgaagtcatcaaacgtgctaatgacacggatgtcggtttagcaggctacttctacagtcaaaatattagcaccatttttgatgccgcagagaaactaaatgttggtatggttggtgtcaacactggagaaatcagtgaacctgcagtacctttcggtggtgttaagaattcaggtttaggtaaagaaggttctaagtatggtatcgatgattacactgaattgaaggccatcattgtggcaccatag

SEQ ID NO: 182 - protein, 504 aa, Kluyveromyces lactis NRRL Y-1140
MFRNSNTLRTLNLLRKMSSKIENDYLIQTKAFINGKWTETDDKFAVTNPSTGDTIREVTNCGVSDFNKAIEIAHDAFGTFRQTNVRERAQILDNIYNLMLENKQDLAKILTLENGKPYKDSLGEIVYSAMFFKWFAEEAPRIYGDIIPSAVSSDQKIFTIRQPLGVIGILTPWNFPSAMIARKLAPVIATGNTCVIKPAHETPLSALALGVIAEKAGLPAGVCNILPTNHTSEIGEYVCEHELVKKITFTGSTKIGQLLMGQSSKGKNIKKFSMELGGNAPYIVFKDADLDRALDGIIGCKFRQSGQTCICANRIFVHEDLYDEFSKRLVDKIDKTFKLGDGFQDGVTHGPLIHDKSIDKVASLVQDAKTKGADVLIGGSRASSLGPLFYQPTVLGNVTESMDIFYEEIFGPVAPLIKFKDVDEVIKRANDTDVGLAGYFYSQNISTIFDAAEKLNVGMVGVNTGEISEPAVPFGGVKNSGLGKEGSKYGIDDYTELKAIIVAP

SEQ ID NO: 183 - DNA, 1563 bp, Debaryomyces hansenii CBS767
  CDS (1)..(1563)
atgttaagaaattctgcatccaacattgtcaaagcgacatatacaagaagattgtactctacgtacgattcttcttccaaagtcttatccagcttaaagaacaaagatcttatcagaactcaaggatatattaatggtcaatgggttgctagcagtgacaattcaacgttcgaagttaataatcctgccttagcatctggagcaggtacaaagatagctgacgtgtcttccatgacgacaaaggattatgttagagctattaattctgcccaagacgcatttagtgatttcaagaagactacaggacgttacaggagtgatttacttatgaatttatatagattaatgcaagaaaatcaagatgatttggctaagcttatagtgcttgaaaacggaaaaccatatgctgatgcttttggagaagtagcttatgcaagttcattcttccaatggtttgcagaagaggcaccaagagtttacggtgatataatcccttcagccttggctgacagtaaaatattagtaatgaggcaacctattggggtatgtggaatattaactccctggaatttcccggctgcaatgattaccagaaaattaggtgctgcagctgctactggttgtactactgtcatcaaaccagcttctgaaacaccattatctgctttggctttagcatatttggcggaacaagcgggtttccccaaaggctccgttaatgttttgccttcatccgatgctgctggagttggtaaattgatgtgtgagaatccaaccataaagaaggtttcatttactggttccactaatgttggtaagcttttgatgtctcaatcttcgtctactttgaagaaattatcaatggagctcggtggtaattcaccttttatcgtctttaacgatgctgatatcgataaggcagtcgacggagcaattggttcaaaattccgttcgtctggccaaacatgtatttgcacaaatagacttttcgttcatgaatctatctatgatgaatttgcttccaaattgactaaaaaattatcggaaacagtgaaattaggtaacggcttagctgacggaactacacacgggcccctcatccatggtaaatctatgaataaagtgagatcacatattgaagatgcaacgtctaaaggtgctaaggttttacttgggggtaataagcgtgaagaccttggagtaaatttccatgagttaacggtccttggtggtgtcacacaagagatggatatcttcaatgaagaaacttttggtccggtagcacccttaattaaattcaagtctgacgaggaagtcattagcttagcaaatgataccgatgttggattagcaggttacttctactcttcaaatattaatagggttttcaaggttgcagaagagttacaagttggaatgattggtgcaaacactggtgcgatctctgaatcagcattaccatttggtggagttaaggaatctggatttggaagagaaggctccaagtatggcattgatgattatactgttgttaagagtgttgtattaggtggtttggattga

SEQ ID NO: 184 - protein, 520 aa, Debaryomyces hansenii CBS767
MLRNSASNIVKATYTRRLYSTYDSSSKVLSSLKNKDLIRTQGYINGQWVASSDNSTFEVNNPALASGAGTKIADVSSMTTKDYVRAINSAQDAFSDFKKTTGRYRSDLLMNLYRLMQENQDDLAKLIVLENGKPYADAFGEVAYASSFFQWFAEEAPRVYGDIIPSALADSKILVMRQPIGVCGILTPWNFPAAMITRKLGAAAATGCTTVIKPASETPLSALALAYLAEQAGFPKGSVNVLPSSDAAGVGKLMCENPTIKKVSFTGSTNVGKLLMSQSSSTLKKLSMELGGNSPFIVFNDADIDKAVDGAIGSKFRSSGQTCICTNRLFVHESIYDEFASKLTKKLSETVKLGNGLADGTTHGPLIHGKSMNKVRSHIEDATSKGAKVLLGGNKREDLGVNFHELTVLGGVTQEMDIFNEETFGPVAPLIKFKSDEEVISLANDTDVGLAGYFYSSNINRVFKVAEELQVGMIGANTGAISESALPFGGVKESGFGREGSKYGIDDYTVVKSVVLGGLD

SEQ ID NO: 185 - DNA, 1479 bp, Debaryomyces hansenii CBS767
  CDS (1)..(1479)
atgtctaaaccaacattgaataacccagacttaatcagaacaaaaccttacattaatggtgaatggtttgaatcaaaatcgaccaaaacttttaaggtgattgatccagcgactgaaacagagattgtcgaattgccggatcagacaccagaagagattgcgtttgccatcgaaaaagccgaagaggccttcaaaacattcaagaagacaaatgcatatgacagagctagatggttgagaaagttgaatgatctcatgttggaaaacatcgaagatttagccaaaatcttgacctgggaaaatggtaaatgtttaacagatgctacaggagaaatcaagtatgcagcatcatattttgaatggtttgccgaagaagccaagcgtatctatggtaatactatccagccttctaataataacaacaaagtgattacttacaaacaaccaatcggtgtagttggattgttatgtccattcaatttccccacagctatgggagcaagaaaattggcaccttcttttgctgctggatgtaccactattttgaagccagacggtcagactccgctttcatcattggcattggcttacttggctgaaaaagccgggttcccaaagggtacctttaacgttgtgttagcatctaccgaaaatacccctaaagtgggattggaattttgcgaatctcctcgtattaaaaaaatttcgttcacaggctccaccccagtaggcaagttgttaatgagacaatcctcctctacgttgaagaaattgtcaatggaattgggaggtaatgcaccaattattatttttgacgatgccgatttggacctcgctgttgagcaatctattgcttctaaattcagatcgttgggacaaacgtgtgtttgcgctaaccgtctctatattcaaagtggtgtatacgataaattttgcgaaaagttcaccgagaaggtgaaggaatttaaaattggtaatggtttagaaaaaggaattacccatggatgtttaatcaacgacaaagctattacaaaagtagaagaacacatcaaggatgctgttggaaaaggtgctaaagtgttagttgaaggaggtaggttaccaaacttgggtaaaaacttttatgctccttctgtagttaaggacgttacacaagaaatggtagtggtcaaggaagaaaccttcggcccgttggcagctttactgaaattcgacaccaaagaacaggtcttggactggtgtaatgatactccatatggtttggcttcgtatgtattctctgaaaatttgaacactatttggtttatgtccgaatatttggaatctggtatggtcgcggtgaatactggtcttttcactgacgccgcaatgccgtttggaggcgtcaaagaatcaggctttggtagagaaggctctttatacggtattgatgattatactgtagttaaagcaattactctcggtaatatgtatagataa

SEQ ID NO: 186 - protein, 492 aa, Debaryomyces hansenii CBS767
MSKPTLNNPDLIRTKPYINGEWFESKSTKTFKVIDPATETEIVELPDQTPEEIAFAIEKAEEAFKTFKKTNAYDRARWLRKLNDLMLENIEDLAKILTWENGKCLTDATGEIKYAASYFEWFAEEAKRIYGNTIQPSNNNNKVITYKQPIGVVGLLCPFNFPTAMGARKLAPSFAAGCTTILKPDGQTPLSSLALAYLAEKAGFPKGTFNVVLASTENTPKVGLEFCESPRIKKISFTGSTPVGKLLMRQSSSTLKKLSMELGGNAPIIIFDDADLDLAVEQSIASKFRSLGQTCVCANRLYIQSGVYDKFCEKFTEKVKEFKIGNGLEKGITHGCLINDKAITKVEEHIKDAVGKGAKVLVEGGRLPNLGKNFYAPSVVKDVTQEMVVVKEETFGPLAALLKFDTKEQVLDWCNDTPYGLASYVFSENLNTIWFMSEYLESGMVAVNTGLFTDAAMPFGGVKESGFGREGSLYGIDDYTVVKAITLGNMYR

SEQ ID NO: 187 - DNA, 1539 bp, Debaryomyces hansenii CBS767
  CDS (1)..(1539)
atgttagttacacttaaaactcccactggtaacagtatttctttcaaaacaggtttatttatcaataacgaatttagacaagccaaaaatggaaatgaattgactactccaaatcctgccactggagaaccattggccactattagtgctgctactgctgaagatattgatgatgctgttaaagctgctagaaaagcttttgaaactacatggggtaagaaaagtacaccttcacaacgtagtgaagcccttcacaaatgggcagatttgatagatgccaatatcgacactcttgcagaactcgaaagtcttgataatggaaaaccggtatggatggctcgtgatgtcgatattaaagatagtattgcgtgccttcgttactatgctggtcttgctgataagattgaaggccgcactatcgagcaagaagaaggagtaaagttagcctttactagacctgaaccaattggtgtatgtggtcaaattattccgtggaattacccaatccagatgtttgcttggaaagtgggccctgccttggccgctggtaacactgttattatgaaaccggctgaacagactcctttaagtgctctcgttttagctgaattagcagccaaagcaggttttccccctggtgttattaatattgttaatggattgggtgctgtagctggaaaagctatctcatctcatatggatattgacaagattgccttcacgggctctaccgtcactggacgtaccattatggaagcggctgctaagagtaatctcaaaaaagttactcttgagcttggaggtaaatcacctgtagttgtcttcgacaatgctgatattgatcaagctgtaaactgggtcagtcaaggtattcttttcaaccatggtcaagattgctgtgctggttctcgattattcgttcaagacactattaaagatgtattccttgcaaaacttaaaacgaattttgaatcacacgttattggtgatccatttgacatcaaaactttccaaggaccccaagtatctaaacaacaacaagaaaaaattcaatcctatattaaatcgggtatagaagaaggtgctactctttttactggtggggaacaaagattggctcatttatcagctcaatttaaaaatggttattatgtttctccgacaattttcacagattgtaaaccgggcatgaaaatcgtcgatgaagaaatattcggacctgttcttactgttcaaagttttagtactgaggaagaagctgttgaaaaggcgaacaatacagaatatggtcttgccgctggtgtattctctcaaaatgcttcccaatgcatgcgcatggtacatgctctccgtggaggtactgtttggtgcaatcattatatggcattaagcaatgccgtcccatttggaggtatgaagcaatccggattcggccgtgaattaggtattgagggtttgaaggaatacacccaaaccaaagctgttcactggaattatggcgaagaagctgtctggccaattgatggaactaccgtttaa

SEQ ID NO: 188 - protein, 512 aa, Debaryomyces hansenii CBS767
MLVTLKTPTGNSISFKTGLFINNEFRQAKNGNELTTPNPATGEPLATISAATAEDIDDAVKAARKAFETTWGKKSTPSQRSEALHKWADLIDANIDTLAELESLDNGKPVWMARDVDIKDSIACLRYYAGLADKIEGRTIEQEEGVKLAFTRPEPIGVCGQIIPWNYPIQMFAWKVGPALAAGNTVIMKPAEQTPLSALVLAELAAKAGFPPGVINIVNGLGAVAGKAISSHMDIDKIAFTGSTVTGRTIMEAAAKSNLKKVTLELGGKSPVVVFDNADIDQAVNWVSQGILFNHGQDCCAGSRLFVQDTIKDVFLAKLKTNFESHVIGDPFDIKTFQGPQVSKQQQEKIQSYIKSGIEEGATLFTGGEQRLAHLSAQFKNGYYVSPTIFTDCKPGMKIVDEEIFGPVLTVQSFSTEEEAVEKANNTEYGLAAGVFSQNASQCMRMVHALRGGTVWCNHYMALSNAVPFGGMKQSGFGRELGIEGLKEYTQTKAVHWNYGEEAVWPIDGTTV

SEQ ID NO: 189 - DNA, 1515 bp, Debaryomyces hansenii CBS767
  CDS (1)..(1515)
atggtttctacaaatttaccattagaaatcccaattactttaccaaatggtattaaatatactcaaccaacagggttattcattaataatgaatttgtgaggtctaagcagggcaataagtttgaagtcctttcaccatcaacagaagaagtagttacatcggtatacgaagctcgtgaggatgatgtggatatagcggtgcaacatgccctgagagcatttgaagaatcttcgtgggcaaaagcagacccctgccagagaggtgctgcattatacaaattagcaaatttaattgaggagaactttgaaacaattgcctctatcgaagctatggataatggtaaagctataggcaatgcaaaaggagatgtcacattggcaatttctgttttgaggtcgacagctggattctctgataagatgttgggttctgttattgaaagcggtgacagccattttaatttcaccagacgtgaaccacttggtgtctgtggccaaattattccatggaactttccattattaatgttcacttggaaaatagccccagcattggtaacgggtaattgcgtagttataaagtcttctgaaacaaccccattgtctgcgttgtatgtttctaatttgattaaggaagctaatttatttcctcctggggtgcttaacgtcataagtggatttggtaaatacaccggtaatgctattaccgagcatcctcttatcaagaaggttgcatttactggttcaactgcaacaggtaaaactatcatgagaaagtgtgcagagagtaatttgaagaaggtcaccttagaattgggagggaaatcgccacatataatcttcaacgatgctgatatggacacaacattgaaatctgtggttactggcatcttctataattcaggtgaagtttgttctgctggttcacgtctatatattcaagaaggtatttatgatgcatttgttgaaaaattcgtacaaactactaaatctgacgttaaggtaggtgatccattcttaccagatactattcaaggtgcccaaaatagcgttgatcaattggataagattttgaaatatattcagatcggtactgatgaaggtgcaaaaatattggctggtggagaaagattgcaaggaaagggatacttcattaaaccaactatttttggtgatgttaaagaagatatgagaatcgtccaggaagaaatcttcggtcctgttataacaattagtaaattcaaaactactgatgatgttgttcgtatggctaataatacagattatggtttggctgctggtattcagacttcaaacgtaaacagagcaattgatgtttcccgtagattaaaggcaggcaccgtttgggtgaatacttacaatgatttccatccaatggttccatttggcggttataacctgtctggtatgggaagagagatgggtgtagaagtattacaaaactatacccaaacaaaggcggttagaatgagtattattaaaccaaaagattaa

SEQ ID NO: 190 - protein, 504 aa, Debaryomyces hansenii CBS767
MVSTNLPLEIPITLPNGIKYTQPTGLFINNEFVRSKQGNKFEVLSPSTEEVVTSVYEAREDDVDIAVQHALRAFEESSWAKADPCQRGAALYKLANLIEENFETIASIEAMDNGKAIGNAKGDVTLAISVLRSTAGFSDKMLGSVIESGDSHFNFTRREPLGVCGQIIPWNFPLLMFTWKIAPALVTGNCVVIKSSETTPLSALYVSNLIKEANLFPPGVLNVISGFGKYTGNAITEHPLIKKVAFTGSTATGKTIMRKCAESNLKKVTLELGGKSPHIIFNDADMDTTLKSVVTGIFYNSGEVCSAGSRLYIQEGIYDAFVEKFVQTTKSDVKVGDPFLPDTIQGAQNSVDQLDKILKYIQIGTDEGAKILAGGERLQGKGYFIKPTIFGDVKEDMRIVQEEIFGPVITISKFKTTDDVVRMANNTDYGLAAGIQTSNVNRAIDVSRRLKAGTVWVNTYNDFHPMVPFGGYNLSGMGREMGVEVLQNYTQTKAVRMSIIKPKD

SEQ ID NO: 191 - DNA, 1566 bp, Debaryomyces hansenii CBS767
  CDS (1)..(1566)
atgtttaagaattcaattgcaaaacaagcaagaagtaacgtagcttatgcaaaatcatttataagaatgtcatccaatttacctttacaagtttcaattaagttgcctaacggtactacatatgaacagccaactggtatgttcatcaataacgagtatgtctatccaaagcaaaagaagacattcgatgtgatttctccatccacggaagaacatatcaccgatgtgtacgaggcattggaagaggatatcgacactgctgttgaagcggctagtgctgcattcaagtcttcgtggtcgaccggagacccatcggtcagagccaatgctttgctcaaattggctgatttggttgacgccaacgctgatacccttgctcacatcgaagccttggacaacggtaaatccttgatgtgttccagaggagatgttgccttaaccgccatgtacttcagatcgtgtgcgggatgggctgacaagatcttgggtactgtgccagaaaccggttccacccatttcaactacactagaagagaaccaattggtgtttgtgggcaaattattccatggaatttcccattattgatgttggcgtggaaggttggtccagctacagctaccggtaatactattgttttgaagactgccgaatcgactccattatcgggtttgttccttactggtttgatcaaggaagcaggtttcccacctggtgtggttaacatcctcactggttttggtaagaatgctggtaacgccattgcctctcaccctaagatcaagaaggttgcatttactggttctactgcaaccggaagacacattatgaagtcagctgctgaatccaacttgaagaaggtcaccttagaattaggtggtaagtctccaaacattgttttcaatgatgctgatgtccaaaaatctgcccaatctttgatcaccggtattttctacaacaccggtgaagtttgttgtgctggttccagaatttatgtccaagaagaaatctacgacaacgtcctcgaagaattaaagaacgcttcttctaaaatcaagattggtaacccattcgaagaagacactttcatgggtgctcaagcctcttcccaacaattggacaagattttgaagtacattgaaacaggtaagaatgaaggtgctaagttgatctctggtggtgaaagagttcaaggtaagggttactttattaagccaaccattttcggtgacgtcactgaagatatgcaaattgtcaaggaagaaatcttcggtccagttgtcactatcaccaagttcaagaccattgatgaagttgtcgacttagccaacgactctgaatatggtttagctgctggtatccataccgaaaacatcaacaccgccattggtgttgctaacagacttcaagccggtaccgtctgggtcaacacctacaacgatttccacccaatggttccattcggtggttacggccaatccggtttcggtagagaaatgggtgccgaagctcttgacaattacactcaagttaaggctgttagaatcggtcttactgaaaagcattag

SEQ ID NO: 192 - protein, 521 aa, Debaryomyces hansenii CBS767
MFKNSIAKQARSNVAYAKSFIRMSSNLPLQVSIKLPNGTTYEQPTGMFINNEYVYPKQKKTFDVISPSTEEHITDVYEALEEDIDTAVEAASAAFKSSWSTGDPSVRANALLKLADLVDANADTLAHIEALDNGKSLMCSRGDVALTAMYFRSCAGWADKILGTVPETGSTHFNYTRREPIGVCGQIIPWNFPLLMLAWKVGPATATGNTIVLKTAESTPLSGLFLTGLIKEAGFPPGVVNILTGFGKNAGNAIASHPKIKKVAFTGSTATGRHIMKSAAESNLKKVTLELGGKSPNIVFNDADVQKSAQSLITGIFYNTGEVCCAGSRIYVQEEIYDNVLEELKNASSKIKIGNPFEEDTFMGAQASSQQLDKILKYIETGKNEGAKLISGGERVQGKGYFIKPTIFGDVTEDMQIVKEEIFGPVVTITKFKTIDEVVDLANDSEYGLAAGIHTENINTAIGVANRLQAGTVWVNTYNDFHPMVPFGGYGQSGFGREMGAEALDNYTQVKAVRIGLTEKH

SEQ ID NO: 193 - DNA, 1509 bp, Debaryomyces hansenii CBS767
  CDS (1)..(1509)
atgtcattaccactcgaatacaatgttacattaccagacggtaataaatttagtcaaccatcggggttattcattaacaatgaatttgtaaagagcaaatcaggcaagactattgaatcgataaacccttcaacaggtgaagtcaatggatcggtttatgcagcagatgaggaggacgttgattcagcagttaagcatgctagaaatgcgttccatgctgtctggagaaagactacgggtgttgcgagaggtgacttacttaacaagtttgctcaggtcttgcaagaacaaagagacctaattggtgccattgaggcttgggattcgggaaagaccaaagaacagaatgccgtgtatgatattgatgaatgcattaattgttttaaatattttgccggatgggctgacaaaattcaaggaaaagtgatccagaatgatccaaaaaagttggcgtacacagttcatgagccatttggtgtatgtgcacaaattattccttggaattatcctttggctatggctgcatggaaattggctccggcgttggctgccggtaacgttgtggttttgaaatcatccgaagtgactcctttgtcgattttgtatttggcaaagattttcagagatgtaggctttccaccaggtgttgtgaatattttatccggatacggtgcaacatgcggaaaagctttggcttctcatttagatgttgataaaatagccttcacgggttcaactgctaccggaaagttgatacaacaaatggcttcttccaatttgaaagctgtaaccttagaatgcgggggaaagtctccattgattgtgagaaaagatgcagatttggaacaagctgtcaaatgggcagctatcggtatcatgagcaaccaaggtcaaatttgtacgtcaacttctagagtttatgttcatgaatccgtttatgatactttcttaacaatgtacgctaagcatataaaagaggaatatgtacaaggcgatatgtttgaaaagaacgcaattgtaggtccacaggtctccaaacaacaatttgataaaatcttatcttacattgatatcggtaagaaagaaggtgccagagttattttaggcggtgaaaaaaattccgacggaaatatgtcgaaaggattctttgttaaacccaccatatttgccgatgtaaagccagacatgcgaattgttaatgaagaaatatttgggccggttgtcacttgtggaaaatttgcgtctgacgaagaagctataaaatacgctaatcaaacgcaatacggattaggtgcagcgatattcacctcagatataaccaaggctcatagcatggcaagcgatattcaagctggtatggtttggataaactcttccaatgattcagattgccatgttccttttggtggggtgaaaatgagtggggttggtagagaattaggtgaatacggtttatctatgtatacccaagctaaagcaatctacgttaacttgggtacacatttataa

SEQ ID NO: 194 - protein, 502 aa, Debaryomyces hansenii CBS767
MSLPLEYNVTLPDGNKFSQPSGLFINNEFVKSKSGKTIESINPSTGEVNGSVYAADEEDVDSAVKHARNAFHAVWRKTTGVARGDLLNKFAQVLQEQRDLIGAIEAWDSGKTKEQNAVYDIDECINCFKYFAGWADKIQGKVIQNDPKKLAYTVHEPFGVCAQIIPWNYPLAMAAWKLAPALAAGNVVVLKSSEVTPLSILYLAKIFRDVGFPPGVVNILSGYGATCGKALASHLDVDKIAFTGSTATGKLIQQMASSNLKAVTLECGGKSPLIVRKDADLEQAVKWAAIGIMSNQGQICTSTSRVYVHESVYDTFLTMYAKHIKEEYVQGDMFEKNAIVGPQVSKQQFDKILSYIDIGKKEGARVILGGEKNSDGNMSKGFFVKPTIFADVKPDMRIVNEEIFGPVVTCGKFASDEEAIKYANQTQYGLGAAIFTSDITKAHSMASDIQAGMVWINSSNDSDCHVPFGGVKMSGVGRELGEYGLSMYTQAKAIYVNLGTHL

SEQ ID NO: 195 - DNA, 1491 bp, Yarrowia lipolytica CLIB122
  CDS (1)..(1491)
atgtctcttttcagcaaacttaccctagccaacggccttgaggtcgatcagcccactggccttttcattaacggcgaattcgttgccgcgaagtctggcaaaacgtttgaaaccatcaaccctaccaccgaggaagtgatttgttccgtttctgaggcagatgaggaagatgtgaatgctgctgttgacgctgctgctgctgctttcaagacctggggtttcaagactgctcccagtgctcgaggtgcggctctattcaagctggcggacctcattgagcgagacctcgatatcatcgctgcgattgaaacgactgacaacggtaaggtgtacgcccatgccaagggtgatgttgctctggttgtcaaggtcattcgattttatgcaggatatgctgacaagatctacggagacgttatccatggtaacgatggacacttttcctacactcgaaaggagcccattggagtttgtggacaaatcattccctggaacttccccttggtcatgtggtcctggaagattgctcctgctctggctaccggtaacactgtggttctcaagagtgccgagtctactcctctgtctgctctgtacgcggccaagctcgcccaggaagcaggtattcccgcaggcgtgctcaacattgtttcaggttacggaaaggtcggcgctttgatgactaaccaccccaagatccgaaaggtggctttcacaggctcgactgctaccggcaagcaggttctcaagggtgcagctctgtccaacctgaagaagatctcccttgagcttggaggaaagtctcccaacatcatctttgatgatgccaacctgcccaacgccatctcctgggctgctcttggtatcttcttcaactctggagaagtctgtgctgctgcctctcgtctctatgttcaggagggagtctaccacgaagtcgttgctgctctcaaacagcgagctgaggcattggttgtgggcgatccctttgaccagcagaccttccagggggcccagacctccaagattcagttcgaccgagtcatgagcttcattgaggccggaaaggccgagggagctactctgctgaccggaggctgccgagcaaaggacaagggctatttcatccggcccactgtcttcaccgacgttaaaaaggacatgaagattgtgcaggaagagatctttggccccgttgtcgttgtgaccaagttcaagactcttgaggaggtcattgagcttgccaacgactctgagtacggcctggctgcgggtgtgcacacccaggacatttctcgagcccactatttggcagagaacctccatgccggaactgtgtgggttaatacctacaactcgtttcacatctcgcttccttttggaggtttcaaccagagtggtttcggtaaggagatgggcaaggacggactggacagttatattcagaccaaggctgttcgaatcatgtttgaccaggccaagctgcagtaa

SEQ ID NO: 196 - protein, 496 aa, Yarrowia lipolytica CLIB122
MSLFSKLTLANGLEVDQPTGLFINGEFVAAKSGKTFETINPTTEEVICSVSEADEEDVNAAVDAAAAAFKTWGFKTAPSARGAALFKLADLIERDLDIIAAIETTDNGKVYAHAKGDVALVVKVIRFYAGYADKIYGDVIHGNDGHFSYTRKEPIGVCGQIIPWNFPLVMWSWKIAPALATGNTVVLKSAESTPLSALYAAKLAQEAGIPAGVLNIVSGYGKVGALMTNHPKIRKVAFTGSTATGKQVLKGAALSNLKKISLELGGKSPNIIFDDANLPNAISWAALGIFFNSGEVCAAASRLYVQEGVYHEVVAALKQRAEALVVGDPFDQQTFQGAQTSKIQFDRVMSFIEAGKAEGATLLTGGCRAKDKGYFIRPTVFTDVKKDMKIVQEEIFGPVVVVTKFKTLEEVIELANDSEYGLAAGVHTQDISRAHYLAENLHAGTVWVNTYNSFHISLPFGGFNQSGFGKEMGKDGLDSYIQTKAVRIMFDQAKLQ

SEQ ID NO: 197 - DNA, 1476 bp, Yarrowia lipolytica CLIB122
  CDS (1)..(1476)
atgcaagttactcttcccgacggaaagtcctacgaccagcccaccaagctcttcatcaacaacgagtgggtcgatggtcacggcggctcaattgagtctgtcaaccccgccaccgagcaggtcatctgctccgttgaggccgctgacgagagtgatgtcgacaaggctgttcaggccgctcgaaactgctacgagaacgtctggcgaaaggtcaccggtgccgagcgagcacagctcatgcgcaagcttgccgaccttgtcgagaagaacaaggacctgctcacctccattgaggctgccgactctggaaagcccaagtacggcaactgtgacggagacgtggacgagctcatctacgtcctgcgatactactccggcctggctgagaaggctggcaatggagtcaccatttctacctccaacgaaaagtttgcctacaccatccacgagccttacggagtctgtggccagatcatcccctggaactaccccattgctatggctgcctggaagctaggtccctgtctcgctgccggtaacgtgctggtcatgaagctttccgaatacacccctctgtccatgctggtcatctgcaacctggtcaaggaggctggtttcccccctggcgtggtgaacgtggttaacggctacggcgccaaggccggcaaccgactggctgagcaccccgacgttgacaagattgccttcaccggttctaccgctaccggtcgatctgtcatgaaggctgctaccggaaacatgaaggccgtgaccatggagcttggaggaaagtctcctctgctcattttcgacgactgcgatctcgccaaggccatcgagtgggcccacattggcatcatgtacaacatgggccaggtgtgttccgccacctctcgaatcctggtgcaagaaggcattgccgacaagttcgtcgagggtttcatcaagcagtgtaatgaggcctccattctgggttgtcctttggaccagaagacctctcacggtcctcaggtcaacaagatccagtatgagaaggtgctcggatacattgagaagggtaaggctgagggagccaagtgcattctgggaggtgaggctgccccccaaaacggcaagggctatttcattaagcccaccgccttcaccaacgtcaacaaggacatgaccatctggaaggaggagattttcggccctgtcgtggtaattgacaccttcaagaccgaggaggaggccattgccaaggccaacgatactccgtacggtctggctgccgctctgtttaccgagaacattcggcgagcccaccgggttgtcaaggagctgcgagctggtcaggtctgggtcaactctgataacgactccgatcctcgagttccctttggtggtgtcaagcagagtggtattggtcgagagcttggtgagtatggtctttctatttacacccaggccaaggccgtccacattaacctggattag

SEQ ID NO: 198 - protein, 491 aa, Yarrowia lipolytica CLIB122
MQVTLPDGKSYDQPTKLFINNEWVDGHGGSIESVNPATEQVICSVEAADESDVDKAVQAARNCYENVWRKVTGAERAQLMRKLADLVEKNKDLLTSIEAADSGKPKYGNCDGDVDELIYVLRYYSGLAEKAGNGVTISTSNEKFAYTIHEPYGVCGQIIPWNYPIAMAAWKLGPCLAAGNVLVMKLSEYTPLSMLVICNLVKEAGFPPGVVNVVNGYGAKAGNRLAEHPDVDKIAFTGSTATGRSVMKAATGNMKAVTMELGGKSPLLIFDDCDLAKAIEWAHIGIMYNMGQVCSATSRILVQEGIADKFVEGFIKQCNEASILGCPLDQKTSHGPQVNKIQYEKVLGYIEKGKAEGAKCILGGEAAPQNGKGYFIKPTAFTNVNKDMTIWKEEIFGPVVVIDTFKTEEEAIAKANDTPYGLAAALFTENIRRAHRVVKELRAGQVWVNSDNDSDPRVPFGGVKQSGIGRELGEYGLSIYTQAKAVHINLD

SEQ ID NO: 199 - DNA, 1569 bp, Yarrowia lipolytica CLIB122
  CDS (1)..(1569)
atgctccgacgaatcactctcaaccagtttaagggcggcctgcgacggctgtccacccttacccccgtcaagaacgaacctctgaccctgcccaacggcgccaagtacgagcagcccgtcggtctcttcatcaacggcgagttcgtcaagtctcagtccggaaagcgattcgagaccgagaaccccaccaccgagacccccatcatctccgtttacgaggctggtgaggctgatgccaacgcagctgtcgaggctgccaagaatgccttcaagaactggggcttcaagaccgctccttccgagcgaggagtcctgctcaacaagctcgctgatctcattgagcgagatctcgacctcatttctgccattgagaccaccgacaacggtaaggtctttgcccaggcccagggtgacgtcgccctcgtcgtcaaggtgctccgatactacgctggatttgccgacaagattggcggcgacctcgtccagaccaacgacggcttcttcaactacacccgaaaggagcctctcggagtgtgtggccagatcatcccctggaacttccctctgctcatgtgggcctggaagattgcccccgctctgaccactggtaacaccgtggttcttaagaccgccgagtccacccctctgtccgccctgtacgcctgtaagctctcccaggaggctggcttccccaagggtgttctcaacgttgtgtccggttatggccccgttggaggcgttctgtccgcccaccccgacatcaagaagattgctttcaccggctccaccgccactggtaagcaggttgctaagaccgccctgacctccaacctcaagaagaccaccatggagctcggtggtaagtcccccaacattatcttcgacgacgccaacctcgaggacgctctttctgccgccgctctcggtatcttcttcaactccggagaggtctgctgcgccggctctcgactctttgtccaagccggtgtctacgaccaggttgtcgaggccttcaagaagaaggctgagtccgtcaaggtcggtgatcccttcgaccccaactctctccagggtccccagcagaacaagaaccagttcaagaagattctgggatacattgagcagggccagaaggagggcgcccatctcctgtgtggaggatctgcccaggccggtcctaacaagggatacttcatccagcccaccgttttcaccgacgtgaacaacgatatgtccattgtgcgagaggagattttcggccccgtcctgaccatcaccaagttcaacaccgttgacgaagtgattgacatggccaacgactccgagtacggtcttgccgctggtatccacaccactgatatcaacaaggcccactatgttgctgagaacattgcctccggtaccatctgggtcaactgctacaacgccttccacgaggccgttccctttggaggatacaagcagtctggtttcggtaaggagatgggtcgagatggtcttgagaactacctccagaccaaggcagttcgagtcaagcttgatgagcgaaagtgggctgacaagcagtga

SEQ ID NO: 200 - protein, 522 aa, Yarrowia lipolytica CLIB122
MLRRITLNQFKGGLRRLSTLTPVKNEPLTLPNGAKYEQPVGLFINGEFVKSQSGKRFETENPTTETPIISVYEAGEADANAAVEAAKNAFKNWGFKTAPSERGVLLNKLADLIERDLDLISAIETTDNGKVFAQAQGDVALVVKVLRYYAGFADKIGGDLVQTNDGFFNYTRKEPLGVCGQIIPWNFPLLMWAWKIAPALTTGNTVVLKTAESTPLSALYACKLSQEAGFPKGVLNVVSGYGPVGGVLSAHPDIKKIAFTGSTATGKQVAKTALTSNLKKTTMELGGKSPNIIFDDANLEDALSAAALGIFFNSGEVCCAGSRLFVQAGVYDQVVEAFKKKAESVKVGDPFDPNSLQGPQQNKNQFKKILGYIEQGQKEGAHLLCGGSAQAGPNKGYFIQPTVFTDVNNDMSIVREEIFGPVLTITKFNTVDEVIDMANDSEYGLAAGIHTTDINKAHYVAENIASGTIWVNCYNAFHEAVPFGGYKQSGFGKEMGRDGLENYLQTKAVRVKLDERKWADKQ

SEQ ID NO: 201 - DNA, 1548 bp, Yarrowia lipolytica CLIB122
  CDS (1)..(1548)
atgccatatatacggtgtctgggggactgtatcggtcccatcaaccaattgctcaacatgtccatctccatttcgctgcccaacggaaacaagtacgaacagcccacgggcattttcatcaacaacgagtggtccgaggcctccgacaagggtaccattcccgtctacaacccgtcgaccggcgacgaggtggtgcaggtggcggctgctactgctgaggacgtggatcgggcagtagttgctgctcgaaaggcgttccagagctggcgagatgtccccggtgaggagcgtgccaagttgctggacaacttcatcaatctggtgtccaagaacctcgacacggtggctgccatcgaggctctcgattccggcaagcctcttcagctcaatgctcggggtgacatcgccggcggcctggccgtctacaagtactacgcagggtgggcggacaaggtgtttggtaagaccattgtcaacaccaccaagaagctggcgtacactcttcacgagccccatggagtgtgtggtcagatcattccctggaactatccgtttctgatggccgcgtggaagattgcgcctgcaattgcggctggcaacgtggtggtgatgaagctcgcggaaaacacccctctgtcgatgctgtatctgtgcaatctgttcaaggaggccgggttccctcccggagtgatcaacatcttcactggccacggcgccaaggctggctcgcgactggctgagcacccggatgtcgacaagattgccttcaccggctccaccgccaccggccgaatcatcatgaagctggccgctaccaacctcaaggccatcactctggaatgtggaggcaagtcgcccatgattgttctgggagatgccgatctcgaccaggccaccaaatgggcccatgccggtattatgaccaaccagggccagatctgctgcggtgtgtcgcgagtgctggttcacgagtccatctacgaccagtttgtcgacaagtacgtcgaggtggtcaagcagcggtctcgagtcggagacatgttccaggacaagattctccaaggcccccaggtctccaaggtccagcaggagaaggtgcttggctacattgagaagggcaaggaggagggcgccaagctggtctactctggcgctgtggctgccgaggcgctcgaaaagggctactttgtgccccccactgtgtttgctgacgtcagagacgacatggtgatttctcgagaggagattttcggacctgtggttgccatcgccaagttctccgacgtggaagacgccatcaaccgagccaacgactccgagtacggtttggccgcgtccgtctacaccaaggacctgaccgaggcccaccgaatctcccgacggctcgaaagtggccaggtgttcatcaacatggcccatatgggcgactaccgaatgccttttggaggatacaaacagagtggaattggacgagagttgggcgagtatggtctcgatacttatactcagtgcaaggcggtgcatattaacatgggtatgaagttgtag

SEQ ID NO: 202 - protein, 515 aa, Yarrowia lipolytica CLIB122
MPYIRCLGDCIGPINQLLNMSISISLPNGNKYEQPTGIFINNEWSEASDKGTIPVYNPSTGDEVVQVAAATAEDVDRAVVAARKAFQSWRDVPGEERAKLLDNFINLVSKNLDTVAAIEALDSGKPLQLNARGDIAGGLAVYKYYAGWADKVFGKTIVNTTKKLAYTLHEPHGVCGQIIPWNYPFLMAAWKIAPAIAAGNVVVMKLAENTPLSMLYLCNLFKEAGFPPGVINIFTGHGAKAGSRLAEHPDVDKIAFTGSTATGRIIMKLAATNLKAITLECGGKSPMIVLGDADLDQATKWAHAGIMTNQGQICCGVSRVLVHESIYDQFVDKYVEVVKQRSRVGDMFQDKILQGPQVSKVQQEKVLGYIEKGKEEGAKLVYSGAVAAEALEKGYFVPPTVFADVRDDMVISREEIFGPVVAIAKFSDVEDAINRANDSEYGLAASVYTKDLTEAHRISRRLESGQVFINMAHMGDYRMPFGGYKQSGIGRELGEYGLDTYTQCKAVHINMGMKL

SEQ ID NO: 203 - DNA, 1548 bp, Yarrowia lipolytica CLIB122
  CDS (1)..(1548)
atgttgcgagccctgaataccgtccagcgactttccagcacccgagccatgtccacctcttccatttcgtctctgcttaagaaccccaatcttctgcgaaaccagggctatgtcaatggtcagtgggtctcctccaagaccggagacactttcagcgttgagaacccagccactggcgagactctgggccaggtgcccgagttctctgtcgccgaggccgatgaggctgtccagcacgcacagactgccttcaagaccttcaaacataccactggacgagagcgatccaagatgctgcgaaagtggtacgatctgatgcaggagaatgctggtgatctggccaccctggtgactctggagaacggtaagtccctcgctgacgccaagggcgagattggctacggagcatctttcttcgagtggttctccgaggaagctcctcgaatctacggagacatcattccatccgccaaccccgccaaccgaatctacacaatcaagcagcccatcggagtctgcggaatcatcaccccctggaacttcccctcggccatgatcacccgaaaggctgctgctgctgttgctgctggctgtaccatggtgatcaagcctggttccgaaaccccctactctgcccttgctctggcttacctggctgaacaggccggcatccctaagggtgttgtcaacgtggtcactactaagaagaacactcgagcttttggtaacgccctgtgcgagaacccgaccgtcaaaaaggtttctttcacgggctccactggtgtcggaaagacccttatgggcgcatcggcctccactcttaagaagctgtcctttgagctcggtggcaacgctcccttcattgtgtttgaggacgccgatattgaccgggctgtcgacggagctattgcgtccaagttccgaggcactggccagacctgtgtctgtgcaaaccgaatttatgtgcacgagagcatcgccgagaagtttgctgagcgaatggcagccgtggtcaaggacttcaaggttggaaacggtctcgaccctaacaccacccatggccctcttatccacgagggagccaagggcaagatccaggagcaggttgacgatgctgtcaagaagggaggaaaggtactcattggaggctccgacgcccctgagatcggaaaggcctttttccagcctaccgtcatttccggggccaagtctgatatgctgattgcctccgaggagacgtttggtcccattgctgccatcttcccctttaagaccgacgctgaggtcattgagcttgccaacaaggcagaggtcggtctggccggctacttctactccaaggacgtgtaccgaatccaacaggttgccgaggctctcgaggtcggaatggtcggtgttaacaccggtctgatgacggagtgtgctctgccctttggcggtatcaaggagtctggctttggccgagagggctccaagtacggcctggatgactacatggtgctcaagactattgttgtgtctggcgtcgagccccacattcagccttaa

SEQ ID NO: 204 - protein, 515 aa, Yarrowia lipolytica CLIB122
MLRALNTVQRLSSTRAMSTSSISSLLKNPNLLRNQGYVNGQWVSSKTGDTFSVENPATGETLGQVPEFSVAEADEAVQHAQTAFKTFKHTTGRERSKMLRKWYDLMQENAGDLATLVTLENGKSLADAKGEIGYGASFFEWFSEEAPRIYGDIIPSANPANRIYTIKQPIGVCGIITPWNFPSAMITRKAAAAVAAGCTMVIKPGSETPYSALALAYLAEQAGIPKGVVNVVTTKKNTRAFGNALCENPTVKKVSFTGSTGVGKTLMGASASTLKKLSFELGGNAPFIVFEDADIDRAVDGAIASKFRGTGQTCVCANRIYVHESIAEKFAERMAAVVKDFKVGNGLDPNTTHGPLIHEGAKGKIQEQVDDAVKKGGKVLIGGSDAPEIGKAFFQPTVISGAKSDMLIASEETFGPIAAIFPFKTDAEVIELANKAEVGLAGYFYSKDVYRIQQVAEALEVGMVGVNTGLMTECALPFGGIKESGFGREGSKYGLDDYMVLKTIVVSGVEPHIQP

SEQ ID NO: 205 - DNA, 1440 bp, Aspergillus nidulans FGSC A4
  CDS (1)..(1440)
atgtcttctcagatcgatactacgcattatccggggaacatcatcaataaccagttcgtgccctccgcgaggacccgtcactccaccaacccttccaccggcgagcccttatatgaggtgccctgggctacagaggaagatgtcgaccgcgccgtagagcacgcccgtactgccttcaagtcgtggtcccggcttccgttccaggagcgttcgcggcttctggtcgcgtatgcggatgccgtggaggcagagcgtgcgccattggcgaaactgctggtcctggaacagggtaagcctctgagcctggcccagacggagctcgacatgagcgtgcagtggttgcgcacatttgtgacaatggaggtcaaggacgagctcctggacgataacgaggagcgctctatcacccagacctttccgccgctgggcgtgtgctgcggcatcgttccctggaactggccggtcctgctcgccctgggcaaggtcggcccagccctcatcaccgggaatactatgatcatcaagccgtccccgtacacgccttactgcgatctgaagctcggcgaaattggcatgcgcatcttcccgccgggtgtcctccaggtgctcagcggcggcgacgagctgggtccgatacttacgcagcatcctggcattgataagattacatttacagggtcgagcgctacggggaagctggtcatgcagagctgcgccaaaacactgaaacgcgtgactctggagctcgggggcaacgacccggctatcatctgtgaggatgttgatatcgatgctattgtgcccaagatcaccagtctcgcgttcctcaactccggccagatctgtatgctcattaaacgggtatacatccacgagagtatctacgatgcctttcgtgacgctatggtcgcgtttgcaaagtcgatcaagaccgcagacgggtttgagccagacgcgttcgtcgggccgatccagaacagcatgcagtacgaaaaagtcaaagacatgtactctgagatcggaaagcgcaactggaaacaggctctcgagggcaaggtattcgagaactccaagggctattacatcagccctgccatcattgacaaccctcctgaagattcgcgtatcgtcctcgaggagcccttcggccccatcgttcctcttctcaaatggtctgacgaggaggatgtgattgcacgcgccaacagcctgaaagacgggctaggtgcctccgtctggagcaaggatctcgatcgggcggagcgaatcggcaggcaactgtctgccggcagcgtttggctcaactcgcactttgatgtcgctccgaacgttccattcggcgggcataaatggagcggcctcggcagtgaatggggcatgaccggcttgaagcagtattgcaattccacctcgctttggaagtggaagaaggtcatgtag

SEQ ID NO: 206 - protein, 479 aa, Aspergillus nidulans FGSC A4
MSSQIDTTHYPGNIINNQFVPSARTRHSTNPSTGEPLYEVPWATEEDVDRAVEHARTAFKSWSRLPFQERSRLLVAYADAVEAERAPLAKLLVLEQGKPLSLAQTELDMSVQWLRTFVTMEVKDELLDDNEERSITQTFPPLGVCCGIVPWNWPVLLALGKVGPALITGNTMIIKPSPYTPYCDLKLGEIGMRIFPPGVLQVLSGGDELGPILTQHPGIDKITFTGSSATGKLVMQSCAKTLKRVTLELGGNDPAIICEDVDIDAIVPKITSLAFLNSGQICMLIKRVYIHESIYDAFRDAMVAFAKSIKTADGFEPDAFVGPIQNSMQYEKVKDMYSEIGKRNWKQALEGKVFENSKGYYISPAIIDNPPEDSRIVLEEPFGPIVPLLKWSDEEDVIARANSLKDGLGASVWSKDLDRAERIGRQLSAGSVWLNSHFDVAPNVPFGGHKWSGLGSEWGMTGLKQYCNSTSLWKWKKVM

SEQ ID NO: 207 - DNA, 1494 bp, Aspergillus nidulans FGSC A4
  CDS (1)..(1494)
atgactccttcgctccagcgccagctcttctacgacggcaaaccccagcacgcctcgtccggccggactttccagtccatcaaccccgccgacgccactctgctggctgaaatccccgtcgcttcacagtcagatatcgacgctgccattacagccgccgagcgcgcattcccttcatgggcgcaaacgccgcctattgcccgtgcgcgtattctccagaaggcggcggccttgctgcgcgaacgcaacgatgagatcgcccgcgtcgagactctagattccggcaaagcgtattcagaaacgagcaccgtcgacgtcgtcactggagctgatgtactggaatactatgcaaacctcgtgggcggtggcggactgaatggagagaccacgcagcttcgggaagaggcgtgggtgtattcgaagaaggctccgctaggggtctgcgtgggaattggcgcatggaactaccctattcagatcgcgctgtggaaatccgctccctgcctcgccgccggaaatactatggtctacaagcctagcgaattcacttcccttcacggtcaaaccctcgccgaaatctacaaggaagctggtcttccagacggcgttttcaacgttgtatacggtgccggcgatgtcggttcctatctcacctcgcacccgaccgtcgccaaggtctctttcaccggccaagtctctactggcatgaaggtctccggagccgcagccggaaatatgaaatatgtcacgatggagctcggtggaaagtcgcctctcctcattcttcctgatgcagatctcgagaacgctgttgacggcgccatgatggccaatttctacagcaccggccaggtctgcacaaacggcacgcgggttttcattcccaagtctatgaagaaggactttgagtcccgtctcgttgagaaaatgcaatatatccggccaggtccgctgttcgatgagaacaccaacttcgggccccttagctcggccgtccaccaggagaaagtcaccgcttatattcgccacggcattgagcaggacaaggccacccttctttacggaggccttggcaagccttctctgccgaaagacctcgaagcaggcttctgggtccgtccgacgatcttcaccgattgcacggacgacatgcgtatcgtcaaggaggaaatttttgggcctgttatgtcaattctgacctacgactctgtggaagaagcagtcaagcgcgccaatacgacggagctgggtcttgccgccggtgtcttcacgaaggacctcaacctagcacaccgcattattgaccagctcgaggcaggtatcacctgggtgaacacatggggcgagagtcctgctgagatggccgtcggtggctggaagaagagcggtcttggcgtggaaaatggtcgtcgcggtattgaggcctgggttcggaataagagcacccttgtcgatatgggcaatgctgttgcgacggtctttgcgaagctgtag

SEQ ID NO: 208 - protein, 497 aa, Aspergillus nidulans FGSC A4
MTPSLQRQLFYDGKPQHASSGRTFQSINPADATLLAEIPVASQSDIDAAITAAERAFPSWAQTPPIARARILQKAAALLRERNDEIARVETLDSGKAYSETSTVDVVTGADVLEYYANLVGGGGLNGETTQLREEAWVYSKKAPLGVCVGIGAWNYPIQIALWKSAPCLAAGNTMVYKPSEFTSLHGQTLAEIYKEAGLPDGVFNVVYGAGDVGSYLTSHPTVAKVSFTGQVSTGMKVSGAAAGNMKYVTMELGGKSPLLILPDADLENAVDGAMMANFYSTGQVCTNGTRVFIPKSMKKDFESRLVEKMQYIRPGPLFDENTNFGPLSSAVHQEKVTAYIRHGIEQDKATLLYGGLGKPSLPKDLEAGFWVRPTIFTDCTDDMRIVKEEIFGPVMSILTYDSVEEAVKRANTTELGLAAGVFTKDLNLAHRIIDQLEAGITWVNTWGESPAEMAVGGWKKSGLGVENGRRGIEAWVRNKSTLVDMGNAVATVFAKL

SEQ ID NO: 209 - DNA, 1455 bp, Aspergillus nidulans FGSC A4
  CDS (1)..(1455)
atgacaacaccaacgccttcggttatccctttgatcatcaacggcaaggaggagctggcttcctcagtgttcgatgtaattagtccttacacaaacaaggcctgctgggccgcagcatctgcttcacctcaagatgccattcgtgccgttgaggcagcccaagcggcgttcccagcatggtcgcagactaagccgactgtccgacgagatatcctcctcaaggcggcagacatccttgagagtagactggagaagtgtgccgagttcatgcggacggagatgggagcagatgctggggcgtcacaattcttcgttgtccccctggcaatccgtatgttgagggaagtggcaagccgcatcacctcaatttgcggcactgtacctgttgtcgaggcggaaggacagagcgcaatcatctataaggagccgatgggagttatcctgggaattgtaccatggaatgcaccgtacgtgttcggtgttcgatctgctgcatgtgctcttgccgccggcaatacgacgattctgaaatcgtccgaactcacgccatgctgttactgggcgctgacccgcgcctttcacgacgccggattgccagacgggtgtctcaaccttgtgtcctgtcgcccgcaggatgcagcagaggtggtcaacgccatgattgagcacccggctgtgatgaagattaactttaccggaagcacggctgttggccggaagatcgctcgtgcttgcgggcagaatcttaagccgtgcctgatggagctagggggtaaaaacagctcaattgtgtgtgctgatgcagatattgaaaccgctgtcaagtccgtaattgccggggcgtatttgaactccggccaaatttgcatggctacagaccggattcttgtgcattcctccattgcaccaacttttgtggaagctctcaagagtgctttgcagtcaatgtctgacccctcatctgagcctccaactctggtcaacgttgcgtccaaggcgcgtgtgcagcggctaatcgagagtgctcttgaagctggtgcccatataattcacggatccgtaactgcagactctgacgcagcaaactcagattctggagtccgtatgccacccgtccttctaggtggagtcaaggaggatatggccgtatggcaggatgaagcgttcgcttcattagcagcttgcatgacattcgacacagaggaagaagcagtccggattgcgaatagcagcgggtatgggctgtccgcggcggtgtttactcaggatctgcgaaaaggtctggcgatcgccaggaaaattcagtctggcgccgtacatatcaacagcatgacgattcacgacgagcccgtactgcctcatggaggcgttaagaacagtggctggggtcgattcaatgcctctcaaggcttggaagaattcttggttacaaaaagtgtgacttggatggactga

SEQ ID NO: 210 - protein, 484 aa, Aspergillus nidulans FGSC A4
MTTPTPSVIPLIINGKEELASSVFDVISPYTNKACWAAASASPQDAIRAVEAAQAAFPAWSQTKPTVRRDILLKAADILESRLEKCAEFMRTEMGADAGASQFFVVPLAIRMLREVASRITSICGTVPVVEAEGQSAIIYKEPMGVILGIVPWNAPYVFGVRSAACALAAGNTTILKSSELTPCCYWALTRAFHDAGLPDGCLNLVSCRPQDAAEVVNAMIEHPAVMKINFTGSTAVGRKIARACGQNLKPCLMELGGKNSSIVCADADIETAVKSVIAGAYLNSGQICMATDRILVHSSIAPTFVEALKSALQSMSDPSSEPPTLVNVASKARVQRLIESALEAGAHIIHGSVTADSDAANSDSGVRMPPVLLGGVKEDMAVWQDEAFASLAACMTFDTEEEAVRIANSSGYGLSAAVFTQDLRKGLAIARKIQSGAVHINSMTIHDEPVLPHGGVKNSGWGRFNASQGLEEFLVTKSVTWMD

SEQ ID NO: 211 - DNA, 1509 bp, Aspergillus nidulans FGSC A4
  CDS (1)..(1509)
atgaagcctccctactacatggaaactgggtgcaagcgaaatccggggagcgattcgacgttgaaggtgcgctggaccttgtacacaagactactccagtcggctaaccagggcttgggtatagaccctggctcggggcaggtctttgcctcatgcccgaccaacacggtcgccgatgtggatgcctatgtctcctctgcgcaccgatcattcctctcttatcgggagactaacccacgcgcacgggcaaagatgcttctgaactggcataacctcatcgcccagtccaagaacgacatcgcaaagcttgtcgtgtatgaaacaggtaagcccatggctgaggccgttggtgaggttgactatgctcttggctttgcgtggtggttcgcgggcgaagcagagcgcgttcgcggatccattgcacagccgtctatctcagagcgacgcactttcgtgatcaaacagccgattggggtctgcatcgcgcttgtgccgtggaactttccagtggccatgatcatccgcaaagcagcagcggcattggcggcgggttgtaccgtcgtgatcaaaccgtccccggagacgccactcagtgtgctggcgttggcagatttggcgctgcaggccggctttggccccggagtgatcaatgttctgaccacagacaatttgaatactccggacgttagtgaggcactctgcaagcatccccttgtgcgcaaggtgacgttcactggaagcacggctgtgggacagctgattgcaaggcattgcagcgaggggctgaagaaggtgacgctagagctcggcggaaactgtccgtttattatctttgacgacggggatctggagcaggcattagctgctttgatgattcttaaatggcgcactgccgggcaggcttgcacccatgcaaatcgcgtgtatgtgcagagtggtgtctacgacacgttcttgcgcatgattgtcaatgctacaaaacagctcaaagtcggccatggggcaagccccgggactaccatgggacccctgacaacgagtcgtgggatcgagaagctcgagcggcatgttgcagatgctcttgcaaagggggcccgactagagcttggggggcatcgactgcagttggagggcaactacttccagcctacgatcatctctgggatgtcggcctatatgttgacaacccaggaggaaatattcgggcccctccttggtctgtaccggtttgaaactgaagaggaggctgtccgcatggcaaacgatacgagcatggggcttgcctcgtactttttcaccagggatgttagtcggacgtggcgactgctagagaatctggaagcgggcatgatcggaatgaacactggcaattcgtcagcggcggagtcaccgtttggtggcatcaaagcgtcaggatacggcaaagaagccggcaaagatgtggctattgaagagtatctcattgccaaaacaggaacattgacagttggagctgtctccaagctctag

SEQ ID NO: 212 - protein, 502 aa, Aspergillus nidulans FGSC A4
MKPPYYMETGCKRNPGSDSTLKVRWTLYTRLLQSANQGLGIDPGSGQVFASCPTNTVADVDAYVSSAHRSFLSYRETNPRARAKMLLNWHNLIAQSKNDIAKLVVYETGKPMAEAVGEVDYALGFAWWFAGEAERVRGSIAQPSISERRTFVIKQPIGVCIALVPWNFPVAMIIRKAAAALAAGCTVVIKPSPETPLSVLALADLALQAGFGPGVINVLTTDNLNTPDVSEALCKHPLVRKVTFTGSTAVGQLIARHCSEGLKKVTLELGGNCPFIIFDDGDLEQALAALMILKWRTAGQACTHANRVYVQSGVYDTFLRMIVNATKQLKVGHGASPGTTMGPLTTSRGIEKLERHVADALAKGARLELGGHRLQLEGNYFQPTIISGMSAYMLTTQEEIFGPLLGLYRFETEEEAVRMANDTSMGLASYFFTRDVSRTWRLLENLEAGMIGMNTGNSSAAESPFGGIKASGYGKEAGKDVAIEEYLIAKTGTLTVGAVSKL

SEQ ID NO: 213 - DNA, 1506 bp, Aspergillus nidulans FGSC A4
  CDS (1)..(1506)
atggccaccgctgtcagcttaactgcccccaatgggcacaaatacgagcagcctattggtttatttataaacaacgagtttgttgcatccaagtctggcgagaaatttgccaccgtcaatcccagtgatgaagaggaaatcacccaagtttatgctgctggagaagaggacatcgatatcgcagtcaaggcagcaagaaaggccctcaaagatccctcatggaagcttcttaccgcaacagaccgaggcaatctgatgctcaaattggcggacctcattgaccagaacaaggaaaccttggccgtcattgaaacatgggacaacggcaagccgtaccaggtttccctaaacgatgacctctcggaggtcgttaacacaattcgctattgtgccggatgggccgataagatccacgggcagaccattagcacaacaccggccaagtttgcatacaccctacgtcaacctattggcgttgttggccaaattatcccatggaatttccccctagctatggctgcatggaagctgggtcctgcgttggcctgcggcaacaccgttgttctaaagcctgcagagcagactccgcttagcatcttgtaccttgccaaattcattaaggaagccggttttccaccaggtgtcgtcaacattgttaatggccttggtcgtgtggcaggatctgcattggttacccatccaggcgtggataaggttgcctttactggctcgaccatgactggtaaggaaatcatgaagatggctgcaggaaccatgaagaatgtgactttggaaactggcggcaagtcacctctgcttgtttttgacgatgcagacctcgagcaggcggccaagtgggcacatatcggtatcatgtacaaccaaggacaggtctgcacggctacgtcgcgtattcttgttcacgaaaaggttcacgatgaatttatcagacttttccgcgaggccgtggcgactaccagcaaggttggagacccattctcagatgacacgttccagggcccccaggttaccaaagcccaatacgagcgtgttctttcttacatcgagagcggcaagcaggagggcgccaccctggtcgacggcggtgtcccatacaagaacgtcaaggacggcaagggtttctttattgcgcccacaatcttcacaaacgtcaaggacaacatgcgcatttaccgcgaggaagtgttcggaccgttcgtcgccattgccagattctcaactgaagaggaagccatcgacagagccaacgacacaacctatggactgggagcagccgtcttcacgaaggacattgagcgagcccaccgtgttgcatctgaaattgaggctggaatggtgtggatcaacagcagcaacgacagcgacttccgcgtgccctttggtggtgtcaagcaaagcggtatagggcgcgaactcggcgaagctggcttagaggcgtacacccaaatcaaggctgtgcacgtcaatatgggaaccaagctgtaa

SEQ ID NO: 214 - protein, 501 aa, Aspergillus nidulans FGSC A4
MATAVSLTAPNGHKYEQPIGLFINNEFVASKSGEKFATVNPSDEEEITQVYAAGEEDIDIAVKAARKALKDPSWKLLTATDRGNLMLKLADLIDQNKETLAVIETWDNGKPYQVSLNDDLSEVVNTIRYCAGWADKIHGQTISTTPAKFAYTLRQPIGVVGQIIPWNFPLAMAAWKLGPALACGNTVVLKPAEQTPLSILYLAKFIKEAGFPPGVVNIVNGLGRVAGSALVTHPGVDKVAFTGSTMTGKEIMKMAAGTMKNVTLETGGKSPLLVFDDADLEQAAKWAHIGIMYNQGQVCTATSRILVHEKVHDEFIRLFREAVATTSKVGDPFSDDTFQGPQVTKAQYERVLSYIESGKQEGATLVDGGVPYKNVKDGKGFFIAPTIFTNVKDNMRIYREEVFGPFVAIARFSTEEEAIDRANDTTYGLGAAVFTKDIERAHRVASEIEAGMVWINSSNDSDFRVPFGGVKQSGIGRELGEAGLEAYTQIKAVHVNMGTKL

SEQ ID NO: 215 - DNA, 1422 bp, Aspergillus nidulans FGSC A4
  CDS (1)..(1422)
atgcttcttgacactactacatttcacaatgttatcaacggccagttgacatccacggccactacccgccactccctgaacccagctaccaagaaagagaacccggccgtcccggtcagcacggccaaagacgtcgacgacgctgtctctgtcgcaaagactgccttcaagtcatggtcgcgcaccagctacgaggaacgccgcagggcgtgcctcgcctacgccgacacccttgaagccaacaaggaggctctggcggcactcctcacccaggagcaagggaaaccgctcgaccaggccgccgtcgaggtcggcatggccgtcacctggacccggcagttgcccacgattgagatccccgagaacgtcatccaggataaggaggagtgccggatcgtccagcggtacacgccgctcggcgtggcggccgctattgtgccctggaacttccccgtcctgctggcagtgggcaagataatccccgctgtttacacgggaaatacagtgattgtaaaaccgtctccctacacgccgtactgcgccctcaaactcgccgagctggcgatctcgcactttccgcccggcgtcatccaggcgctcagtgggggagacgatcttgggcccatgatcaccgagcaccctgggatcgacaagatctcgttcacaggctcgacggctactggtaagaaggtcatggccagcgcgtcgaagacgatcaagcgcgtcactctcgagctgggcggcaacgacgccgcgattgtctgcgacgacgtcgatatcgacaaggtcgttcctaacctcgctatcctctccttcctgacctcctcgcagatctgcatgatgatcaaacgtctctacgtgcacgaaaagatctacgacaagttcctgcaaaaatttgtcgcgtttgtctccaacttcaaggtcggcgccggcacgcaggaaggcgtcttcatcggccctgtgcagaacgagatgcagtataagaaggccaaggacctcttctccagcatcgagtccgagaagctctgcgctgtcttgggcggcacaatcaccgcgtctgacggctactacatcgcgccaacgatcatcgacaacccgcccgagagctcgcgcgtcgtgcaggaggaaccgtttgcgcctattctgccggtgctcaagtggtccgacgaggacgacgtgattgcgcgtgccaacggaaccgacagcgctctggcagcgagcgtctggagtgtggatatggagcgggcgcagcgtattgcggggcagctggccggagggtcagtgtggatcaactcgcacttcgaggtcagtccatttgccccgtttggggggcacaagagctcgggcattggcgtggagtgggggctgtcggggttgttggggtactgcaattcgcagacgatatggatgaagaaggcgtag

SEQ ID NO: 216 - protein, 473 aa, Aspergillus nidulans FGSC A4
MLLDTTTFHNVINGQLTSTATTRHSLNPATKKENPAVPVSTAKDVDDAVSVAKTAFKSWSRTSYEERRRACLAYADTLEANKEALAALLTQEQGKPLDQAAVEVGMAVTWTRQLPTIEIPENVIQDKEECRIVQRYTPLGVAAAIVPWNFPVLLAVGKIIPAVYTGNTVIVKPSPYTPYCALKLAELAISHFPPGVIQALSGGDDLGPMITEHPGIDKISFTGSTATGKKVMASASKTIKRVTLELGGNDAAIVCDDVDIDKVVPNLAILSFLTSSQICMMIKRLYVHEKIYDKFLQKFVAFVSNFKVGAGTQEGVFIGPVQNEMQYKKAKDLFSSIESEKLCAVLGGTITASDGYYIAPTIIDNPPESSRVVQEEPFAPILPVLKWSDEDDVIARANGTDSALAASVWSVDMERAQRIAGQLAGGSVWINSHFEVSPFAPFGGHKSSGIGVEWGLSGLLGYCNSQTIWMKKA

SEQ ID NO: 217 - DNA, 1575 bp, Aspergillus nidulans FGSC A4
  CDS (1)..(1575)
atgccttctcatacctacccccaaaggctctacaccacagggtacactgtacctccgttgaaagataagtctttgtttattcagaaagccttcgtcaatggtgaatgggtagatgcggaatccggaaaaacattcgaggtccacgcgcacatcgatgctaatgggtggtatctcgatgttttgacagatcctgctacggggaaacttattggaacatgcccggaatttagcgcatctgacacagagaaagccatccaggcggccagcgcggccttccctaagtttcgtgcaactctcgcccgtgagcgagctcggatgctccgacggtggtaccagcttatggtagacaatgccgaagatctggcaacacttattacgtgggagaacggaaagccgctcgcagacgccaaaggagaagtgaattacgccgctagcttcttcgaatggttcagcgaggaggctcctcgcacctacggcgacactatcccggcttctgtacctggtaaccgcgtaatcaccgttaaacagcctgtcggcgtttgcggtctgattacgccctggaacttcccagctgccatgatcacacgcaagattggacctgctcttgctgccggctgcactgtagtcacaaagtcaccgggagagactcccttcactgccaacgctctcgcagaactggcaaaccgcgctggtatccccaagggagttgtcaatatcgttacagccatgaagaacacccccgaagtgggcgagatgatcaccacacacccagacatccgcaaggtctctttcactggctcaacaaacgttggcagactcttgatgaaacaatcatcctcaactatcaagaaggtctcctgggaactcggcggcaacgcccccttcatcgtcttcgacgacgtcgaggacctcgatgccgctgttaccggagcaattgcctccaaattcagaagctccggtcaaacttgcgtttgcgctaaccgaatctatgtgcaaaagggcatttacgacgaattcgtccagaagtttgtcgagaaggtcagaaacttcaaagtcggtgctggcttcgaagatggtgttacccacggcccggttattcatgatcgtgcagtcgacaaggttgaccagcacgttcaggacgccatctcaaagggtgccaagcttattgctggtggccagagacgttctgacttgggtcccaacttctatgaccttacagtccttgcgaacatgaccaaggatatgaagattgcctcggaggagaccttcgggcctgtggctggactgttcccgttcgagactgagaaggaagttgtcgagctggctaacaaggctgaggtcggtctggctggatacttctttagcggcaacattaagcgcattttccgcgtggctgaagctctggaggttggtatggttggtgttaacactggtttgattagtgatgttgcgtctccattcggtggtgtcaagcaaagtggctttggtcgtgaaggtagcaagtatggtattgaggagttcatgacaattaagagtgttacttttggtgggatgggtgagcctttgcagtcgtga

SEQ ID NO: 218 - protein, 524 aa, Aspergillus nidulans FGSC A4
MPSHTYPQRLYTTGYTVPPLKDKSLFIQKAFVNGEWVDAESGKTFEVHAHIDANGWYLDVLTDPATGKLIGTCPEFSASDTEKAIQAASAAFPKFRATLARERARMLRRWYQLMVDNAEDLATLITWENGKPLADAKGEVNYAASFFEWFSEEAPRTYGDTIPASVPGNRVITVKQPVGVCGLITPWNFPAAMITRKIGPALAAGCTVVTKSPGETPFTANALAELANRAGIPKGVVNIVTAMKNTPEVGEMITTHPDIRKVSFTGSTNVGRLLMKQSSSTIKKVSWELGGNAPFIVFDDVEDLDAAVTGAIASKFRSSGQTCVCANRIYVQKGIYDEFVQKFVEKVRNFKVGAGFEDGVTHGPVIHDRAVDKVDQHVQDAISKGAKLIAGGQRRSDLGPNFYDLTVLANMTKDMKIASEETFGPVAGLFPFETEKEVVELANKAEVGLAGYFFSGNIKRIFRVAEALEVGMVGVNTGLISDVASPFGGVKQSGFGREGSKYGIEEFMTIKSVTFGGMGEPLQS

SEQ ID NO: 219 - DNA, 1449 bp, Aspergillus nidulans FGSC A4
  CDS (1)..(1449)
atggcctcaaatcacaccaacggagataaagcaatgcttcctctcataatcaacaatgagtcagtcatcacggacaatgtagtggaggtccataacccggcaacaggcgaactcctccaccgttgcgctggcgcatccgttgacgatgcaaaccgtgccgtggcggctgcgaaagctgcctttcctatctggagcaagacgcatccgtacgagcgcagggcgatactgagcaaggctgccgatatcatgttttctcggaaggaggagttcatcaaaacccaaatggaggaaacaggagccgggaggatgtttgtggaggtgacattcatggcaagcgtttcgttcttgagggacttcgcagggatgattcccagcgttgaaggaagagcgcctattgttgctgaagaaggacaaagcgcgttggtgataaagcagccatatggtgttgttctagggatcgcgccctggaacgctccttttatcctcggaactcgttcagtcgctctccctttggccgctggaaacacaacgatcctcaaaggctccgagttgtctccgaaatgtttctggttgatcggggatgttctccgggaagctggacttcccgcaggctgcttgaacgtgatctatcacaagacctcagatgcgcccgcggtcaccaatgcgcttattgcccacccagacgtgcgcaagattagcttcacgggtagcactcttgttggttcgatcattgcctccaccgctggaaagtatatcaagccggttctgcttgagctgggtggtaaagcctccgcgattgttctagatgatgccgacctggagaaggctgcgatgggctgtacactgggggcttttctgaactctggccaaatctgcatgtcgacggagcgcatagtagtccaacgccctgtcgcggagaaattccagaagttactcgttgaaacatccgagaagattttcggcaagaacgcgcctgcacctgtccttgtggcgaccgctgcggtcaagaaaaaccaaggtctggtagctgatgcgatcgataagggtgcctctgtcgtttttggcgaccctaaagaaagcgagccatgcgcaaacgctctgcgccccgttatcgttggaggcgtcaccaaggagatggacctctatgccacagagtctttcggaccgacagtgtccctgatcgttgtcgacagtgaggaggaagccattaaggtggccaacgacacagaatatggcctcacatcggcagtgtttacgagcaatctgtttaggggtctaagggtggccaagcagattgagtctggtgctgttcacatcaactcaatgacggtccacgatgagccgactctgcctcacggtggatggaagagcagtggattcggccgcttcggtggcaccgctggctatgacgagtggcttcaaacaaagaccattacctgggtggagtaa

SEQ ID NO: 220 - protein, 482 aa, Aspergillus nidulans FGSC A4
MASNHTNGDKAMLPLIINNESVITDNVVEVHNPATGELLHRCAGASVDDANRAVAAAKAAFPIWSKTHPYERRAILSKAADIMFSRKEEFIKTQMEETGAGRMFVEVTFMASVSFLRDFAGMIPSVEGRAPIVAEEGQSALVIKQPYGVVLGIAPWNAPFILGTRSVALPLAAGNTTILKGSELSPKCFWLIGDVLREAGLPAGCLNVIYHKTSDAPAVTNALIAHPDVRKISFTGSTLVGSIIASTAGKYIKPVLLELGGKASAIVLDDADLEKAAMGCTLGAFLNSGQICMSTERIVVQRPVAEKFQKLLVETSEKIFGKNAPAPVLVATAAVKKNQGLVADAIDKGASVVFGDPKESEPCANALRPVIVGGVTKEMDLYATESFGPTVSLIVVDSEEEAIKVANDTEYGLTSAVFTSNLFRGLRVAKQIESGAVHINSMTVHDEPTLPHGGWKSSGFGRFGGTAGYDEWLQTKTITWVE

SEQ ID NO: 221 - DNA, 1467 bp, Aspergillus nidulans FGSC A4
  CDS (1)..(1467)
atggcccaagtcgaagttccaagcaccaacggcagcgggaagtctgtcgagactcgtctctttatcaatggcgaattccaaccctcgtccgatgggaagacattcagtctgatcgacccattcacgcagaattcagttgcagaagtttcccaggccactgaagaagacacaaacaatgccgtcgcagctgccaaagcagcattcccggcgtggagagatcgctcccccgctgatagaggcgcctgtctccacaagctggccgctctaattcgtgaaaacaacgaggagtttgcgcggttggaggccttgtccactggaaggcctgtatcgcggtatttcgatgctaccgtttcagcagatactttctcctacttcgctgaggctggttggacggtccaggggacatctagcttgaacacgcccggccaccttaacatgaccgtcaagcagccttatggcgtcgttgcttgcattatcccctggaacgtgcccatggcatttttcgcattcaaggttgcgccggctctggcggctggaaacacggtcgttctgaagagcagcgagaaggcgccattgacttccgccctggcagccacgctgatcgccgaagccggcttcccacctggcgtcatcaacattctgtccggcttcggtacccccgccggcagcacgctagcatcacacatggacgtgcgttgcctcagctttacaggctcctcgttcacaggccaaaggattcaagcagcggccgccgcatcgaacatgaagattgtgcacatggaactcggcggaaagtcacctgctctcatcttcgaggacgccgacctagaaaacgccgcccaagcgacacagttcagtatccagtgcctgagcggacagacctgcatggcgaactcccggatatacgtccaggagtctgtggctgacgagttcttggccttgttcaaggaaaagttcggaagcgcggtccttggtaacccgctcgaatcaggcacaacacacggtccacaggtcgatgggctgcagtacgagcgtgtaaagtcttatatcactatcggtgaacaggacggaaaacttagcatgggtggtgatgcaggcaatgggtactttgtcaagccaactgtctttgagggtgtccctgaggactcgcgcatcgtgaaagaggaggtttttggtccagttgttgtgatcaacaccttcaaaacagaggaggaggccattaagaaggctaatgcatcggagtttgggctgtatgcatccgtcttcacaaaggatctagaccgcgcagtgcgtacctcgaagctcctggaagctggtactgttggcgtcaacactacaagtcctaatgtcgccaaggacatgccgtttggtgggtacaagatgagtggtgttgggcgtgagggcttcatgcacagtcttgacaacttccttgagaccaagacgattttgatcaagatgagctcttga

SEQ ID NO: 222 - protein, 488 aa, Aspergillus nidulans FGSC A4
MAQVEVPSTNGSGKSVETRLFINGEFQPSSDGKTFSLIDPFTQNSVAEVSQATEEDTNNAVAAAKAAFPAWRDRSPADRGACLHKLAALIRENNEEFARLEALSTGRPVSRYFDATVSADTFSYFAEAGWTVQGTSSLNTPGHLNMTVKQPYGVVACIIPWNVPMAFFAFKVAPALAAGNTVVLKSSEKAPLTSALAATLIAEAGFPPGVINILSGFGTPAGSTLASHMDVRCLSFTGSSFTGQRIQAAAAASNMKIVHMELGGKSPALIFEDADLENAAQATQFSIQCLSGQTCMANSRIYVQESVADEFLALFKEKFGSAVLGNPLESGTTHGPQVDGLQYERVKSYITIGEQDGKLSMGGDAGNGYFVKPTVFEGVPEDSRIVKEEVFGPVVVINTFKTEEEAIKKANASEFGLYASVFTKDLDRAVRTSKLLEAGTVGVNTTSPNVAKDMPFGGYKMSGVGREGFMHSLDNFLETKTILIKMSS

SEQ ID NO: 223 - DNA, 1515 bp, Aspergillus nidulans FGSC A4
  CDS (1)..(1515)
atggcacaaccagtccaattgactgctcctaacggagtcagttacagccagccaacaggcctcttcatcaacaacgaattcgtccccgccgcgtccggcaagaccctgaccaccgtgaatccctatgacgagtctataatcgcaacagtttcctctgccggcccgaaagacgttgaccgtgccgtcgcggccgctcgccaggcgtttgcctcagaatggcgcggcctcaccccctctgaacgcgggctcctgctcctccgccttgcggacctgtgtgaccgcgacaaggagatcctcgccactatcgacgcatgggataacgggaagccgtacgagcaggcactgggcgaggacatagccgaggtcattgccgtcttccggtactatggcgggtgggccgacaagatccacggttcgacgatcgatacgggcgatgcgaagttcgcgtatacgcgacatgaacccctcggggtgtgcgggcaaatcatcccgtggaattatcctgttatgatggccgcgtggaaattaggtcctgcgctcgcgtgcgggaacaccgttgtcctcaaggccgccgagcagacgcctctctcggtgctgtaccttgcgactctgataaaggaagctggcttcccggcaggcgtcgttaatctgctgaatggcgaaggggccagcgccggcgccgccatcgccggccatcctggtgtcgacaagatcgctttcactgggagcacaaacaccgggcgcgtcattatgaaggccgctgcgggcaatttgaaagcgatcactctagagacaggcggcaagagtccgcttctcgtatttgatgacgcaaatatagaccaggctgtcaaatggtcccatgttggtatcatgagcaacatgggccaaatctgcacggccacttccaggatatacgtccaagagacgatctatgatacctttgtcgagaaattcaagcagtacacgatcgagaacagcaaggtcgggtcgcaattcgacccctccgttactcacggccctcagatctccaaggcgcagcgcgaccgcatcctgagctacgtgcagtcggccaaatccgaaggcgctcagctggtactcggtgacgagcctgtctctgaaaagggctactttgtcccacccacgatcttcaagaatactacgcgggagatgagtgccgtccgagaggagatatttggtccctttgtcgtcattcagtccttcagtacgcagcaggatgcgattaacaaggcgaatgacactgagtatgggcttggggcggcggtgttcacggaaaatatcacgcgggctcatcgcgttgcggccgcaatccaggcaggcatggtgtggatcaacagttctcaagactcgcattttgctatcccctttggcgggtacaagcagagtgggattggtcgggagttgggtgaatacgctctggcagcgtatacgcaagtcaaggctgttcatggcaagttctcccttcctctagaattcaacttaggaacctggctataa

SEQ ID NO: 224 - protein, 504 aa, Aspergillus nidulans FGSC A4
MAQPVQLTAPNGVSYSQPTGLFINNEFVPAASGKTLTTVNPYDESIIATVSSAGPKDVDRAVAAARQAFASEWRGLTPSERGLLLLRLADLCDRDKEILATIDAWDNGKPYEQALGEDIAEVIAVFRYYGGWADKIHGSTIDTGDAKFAYTRHEPLGVCGQIIPWNYPVMMAAWKLGPALACGNTVVLKAAEQTPLSVLYLATLIKEAGFPAGVVNLLNGEGASAGAAIAGHPGVDKIAFTGSTNTGRVIMKAAAGNLKAITLETGGKSPLLVFDDANIDQAVKWSHVGIMSNMGQICTATSRIYVQETIYDTFVEKFKQYTIENSKVGSQFDPSVTHGPQISKAQRDRILSYVQSAKSEGAQLVLGDEPVSEKGYFVPPTIFKNTTREMSAVREEIFGPFVVIQSFSTQQDAINKANDTEYGLGAAVFTENITRAHRVAAAIQAGMVWINSSQDSHFAIPFGGYKQSGIGRELGEYALAAYTQVKAVHGKFSLPLEFNLGTWL

SEQ ID NO: 225 - DNA, 1500 bp, Aspergillus nidulans FGSC A4
  CDS (1)..(1500)
atggctcagcaatataagcttcctttcgagctggacaaccctgacttgctccactttgattcctacgtcgggaacgcttgggttacagcaaaaagcggtgcgcgattcgaagtcgtcgaccctggtaccgatctcccctgggcaagttgccctacaaactctgctgaagacgtcgattccgccgtccagatcgcgcacgacgcctttgagaagtttaagaaggtcaacccccgccaacgtgcccagtggctgttgaaatgggactcgctcatccgtgaggccagatccgacctggcgaagatcctcacccatgaaacaggcaagccaatcgccgaatcctatggcgagatcgactacgcgaccggtttcacctggtggtttgcgggtgaggcagaacgtatacaagggtcaatcgccgtgcctgccgcgcctaaccggcgcgtcttcactgtcaagcaaccgatcggtgtcgctgctgcccttgtgccgtggaatttccctattgctatggtgttacggaaggccggtgcagctctcgctgccggttgcacgatgattgtcaagcccagtcccgagactcccctcacagccttggtattagcgcacctagcggagaaggcaggcttccccgccggagtgttcaatgtgcttacgacggatctggaaaacacgccgccgctaagcgaagcgctgtgcaagcacccgctcgtgaagaaggttacgttcactggctcaactcgggttggcaagctgattgcctctcactgtgcacacgggttgaagaaggtcacattggaactgggcggaaattgtccattccttgtgtttgacgacgcggaccttgaccaagcgctggaccagctgatggctctcaaatggcgccacgctggtcaggcttgtattactgcaaaccggatttacgtgcaggctggaatctacgacaaattcgcgcagctgctcaaggagcgcacggccaaattggtgatcggccatggtgctaaagaaggcacgactctgggaccgctcacgaccccgcgcagtatcgacaaggccattagccaagtcgaagacgcgcgacggctgggcgcagacgtgattcttggcgggagccgtgtccaaggaacacagggttacttcttcgagccgacaatcttaaaaaacatgaccaaggacatgttggtgtcgcgcgaggagtcctttgctccgatcgctgctctctatcgctttgagactgaggaagaagccgtcaagctggcgaacgacaccagcatgggcctggctagttatgcgttctcgaagaacattgaccgtatgtggcgactgctggagaacttggaagcgggcatgatcggcatgaacacaggaaactcgtctgcggctgagtcgccgtttggaggaatcaaggaatcgggttatggaaaggagagcggaaaggaagttgccgtgaatgagtacctgattaccaagacaggtactctaacgattgatgggcagtactag

SEQ ID NO: 226 - protein, 499 aa, Aspergillus nidulans FGSC A4
MAQQYKLPFELDNPDLLHFDSYVGNAWVTAKSGARFEVVDPGTDLPWASCPTNSAEDVDSAVQIAHDAFEKFKKVNPRQRAQWLLKWDSLIREARSDLAKILTHETGKPIAESYGEIDYATGFTWWFAGEAERIQGSIAVPAAPNRRVFTVKQPIGVAAALVPWNFPIAMVLRKAGAALAAGCTMIVKPSPETPLTALVLAHLAEKAGFPAGVFNVLTTDLENTPPLSEALCKHPLVKKVTFTGSTRVGKLIASHCAHGLKKVTLELGGNCPFLVFDDADLDQALDQLMALKWRHAGQACITANRIYVQAGIYDKFAQLLKERTAKLVIGHGAKEGTTLGPLTTPRSIDKAISQVEDARRLGADVILGGSRVQGTQGYFFEPTILKNMTKDMLVSREESFAPIAALYRFETEEEAVKLANDTSMGLASYAFSKNIDRMWRLLENLEAGMIGMNTGNSSAAESPFGGIKESGYGKESGKEVAVNEYLITKTGTLTIDGQY

SEQ ID NO: 227 - DNA, 1479 bp, Aspergillus nidulans FGSC A4
  CDS (1)..(1479)
atgtcgctcgcctcgttgaaacgcaaagacctcttccagcaacatgggctcatcggcgacaaatgggtctcgtcgtctggcggcggcacattcaccgtcacaaatccagcaactcttgagactctcgctactcttcctgagatgaacggtgcagacactgaatctgccatcacagccgcgcacactgcgttccagtccttcagaaagactactgcccgccaacgcgctacctggctgcggaaatggcatgccctctgcgtcgagaatatcgatgacctggcgctcatcctaaccgtcgagaacggcaagactctcgccgaggcgaaaggcgaggttctatacgctgcatcctttcttgaatggtttgctggtgaagctgagcgagttcacggcgaggtcgtccctgcttcaaatgccaaccagagaatcttgactgtcaagcagcccctcggtgtggctgcttgtcttgcaccctggaattttcctatcgccatgatcacgcgcaaggttggcgctgcgctggcggccgggtgcacgaccgtctggaaaccagcgggtgagacgccgctgagtgcgcttgcgcaggcggtccttgcaagagaagcagggtttccaagcggtactatcaacgtcattacgacgctgaacagtgtcgctgaagtcggagcggcattatgcaattccaagcttgtgcggaagctcagctttacgggctcgacacgcatcggcaagctcctggcaagccagtgcagccaaaaccttaccaagctgtctctggaactcggcggaaacagcccttttattgtttttgatgatgcgaaggttgagacggctgtcgaggcctgtattctcgccaagttcaggaactccgggcagacctgtgtcacggcgaaccgcattttcgtgcaggagggtatctatgaccggttttcggcagcactggtcgagaaggtcaaggcgctgaaggttgggaatggtgtcgaggagggtgtgatcattggacctctgacgcatgagcgcgctgttgaaaaggccgtcgcccatataaaagacgcgcaagaaaagggcgcctccctcctccttggcggctccccgtgccagcccaacaacctgccaggttacttccttgagccaactgtgctaggcaagatgtctaccgaggccctcacaactcgggaagaggtctttgcaccagttgtagcgttgtacccattcaaaacagaagaagaggtgctcgccaaggcaaacgattgtgacgtcgggttaggcagttatgtcattacggagtcgatgccgcgcatgtggagggttgcggagagcctggaggttggtatggttgggattaacatgggcacgctgagtgccgctgagagtccgtttggaggcgtcaaagaatctggctacggacgggaaggcggacgccagggtattgaggaatatatgacagtcaagagtatcttgatgaatgtcgcggcttag

SEQ ID NO: 228 - protein, 492 aa, Aspergillus nidulans FGSC A4
MSLASLKRKDLFQQHGLIGDKWVSSSGGGTFTVTNPATLETLATLPEMNGADTESAITAAHTAFQSFRKTTARQRATWLRKWHALCVENIDDLALILTVENGKTLAEAKGEVLYAASFLEWFAGEAERVHGEVVPASNANQRILTVKQPLGVAACLAPWNFPIAMITRKVGAALAAGCTTVWKPAGETPLSALAQAVLAREAGFPSGTINVITTLNSVAEVGAALCNSKLVRKLSFTGSTRIGKLLASQCSQNLTKLSLELGGNSPFIVFDDAKVETAVEACILAKFRNSGQTCVTANRIFVQEGIYDRFSAALVEKVKALKVGNGVEEGVIIGPLTHERAVEKAVAHIKDAQEKGASLLLGGSPCQPNNLPGYFLEPTVLGKMSTEALTTREEVFAPVVALYPFKTEEEVLAKANDCDVGLGSYVITESMPRMWRVAESLEVGMVGINMGTLSAAESPFGGVKESGYGREGGRQGIEEYMTVKSILMNVAA

SEQ ID NO: 229 - DNA, 1536 bp, Aspergillus nidulans FGSC A4
  CDS (1)..(1536)
atggcggacctcttcgtcgacctcgttgcgccaaacggtactcactactcacaacccacaggactctttatcaacaacgccttcgttgcgtccagtggccagacaatcacctcactcgacccagcgacggacaaaccgatcgctaccgtccatgctgccagcgccgaagatgtcgaccgcgcagtgatcgcagccagagcggctctggtgcacccatcgtggaagaagttgccgggcaccgagcgtggccagctcatggctcgtctggccgatcttatggagaaaaacaaagagctgtttgcgaccatagacgcttgggacaacgtactctcactcactgagaagtcaggcaaaccgtaccacatcgcgctcagcgaggatctcgtggaggcgatcgggactattcgatactacagcggctgggcggataagacgtttggacagacaatcagcacgacgccagcgaagtttgcatataccatccgacagcctgttggtgtagttggccagatcatcccgtggaactatcctctctccatggcctgctggaagctagggccggcgctcgcttgcgggaacacggtcgtgctcaagcctgctgaacagacaccgctgagcgtccttgtgttgggcagcctgatcaaggaggctggctttccacccggggttgtgaatattgtgaatgggtatggtcgcgaagccggagcggctctagcaggccacccgctcatcgacaaaattgcgtttacggggtcgaccgtaacagcacgcgagatcatgaagcttgctgcggggactttgaagaacatcaccctagagactggcggaaaatcaccccttctggtcttccctgacgctgacctggagcaagctgttaagtggtcgcactttggtatcatgtccaaccagggacagatctgcaccgccacttcccgaatctacgtccatcaagatatattccagctgttcctgtccaaattcaaggccgcggttgagacgacttccaaaatcggcgaccaatgggacgaatctacctttcaggggccgcagattacacgcgcccagtacgaccggatcctttcctatatcgagaccgcgaagaaaggcggtatggccgtagtcaccggcggctcagcacatgcgccttcgagcgagaagaacaaggacggctatttcatccaaccgactgtgttcaccggcaccgatgactcgcatgctatcgtccgtgaagaggtctttggcccggttgtggtgatcctacccttcgcgtccgaagaggaagccatcaggcgtgcaaatgacacaacatacggacttggggcggcagttttcacgtgcgatctggaacgtgcgcatcgtgttgctgctgagatagaagctggcatggtctgggtcaacagcagtcaggactgtgatccccgggtgccttttgggggcgtcaagcagagcggtattgggcgtgaactgggcgaggcgggcctggaggcttatacacaggttaaggccgtgcatgtgaacatgggcaacaagctttag

SEQ ID NO: 230 - protein, 511 aa, Aspergillus nidulans FGSC A4
MADLFVDLVAPNGTHYSQPTGLFINNAFVASSGQTITSLDPATDKPIATVHAASAEDVDRAVIAARAALVHPSWKKLPGTERGQLMARLADLMEKNKELFATIDAWDNVLSLTEKSGKPYHIALSEDLVEAIGTIRYYSGWADKTFGQTISTTPAKFAYTIRQPVGVVGQIIPWNYPLSMACWKLGPALACGNTVVLKPAEQTPLSVLVLGSLIKEAGFPPGVVNIVNGYGREAGAALAGHPLIDKIAFTGSTVTAREIMKLAAGTLKNITLETGGKSPLLVFPDADLEQAVKWSHFGIMSNQGQICTATSRIYVHQDIFQLFLSKFKAAVETTSKIGDQWDESTFQGPQITRAQYDRILSYIETAKKGGMAVVTGGSAHAPSSEKNKDGYFIQPTVFTGTDDSHAIVREEVFGPVVVILPFASEEEAIRRANDTTYGLGAAVFTCDLERAHRVAAEIEAGMVWVNSSQDCDPRVPFGGVKQSGIGRELGEAGLEAYTQVKAVHVNMGNKL

SEQ ID NO: 231 - DNA, 1512 bp, Aspergillus nidulans FGSC A4
  CDS (1)..(1512)
atgggcctggaattgaggagtatggttcttgtgagtctggcgaggatttatcagacgggcttcaaggttcgacgcccattattggccgtggcgacaactaactttcaaaacatcatcaatggagaaaaaacctcgactaccgaaagacgccacggcataaatcctgcaacaggggagccaaaccctgacgtccccgtcgcaatcaaggaggatgtcgacagggctgttgtggccgcacaggaggccttcaaaacctggattgatgttccttttgatgagcgccggaaggccctgttggcctatgctgatgcaattgaggagtatgtagcagactttgcaaagcttcttgttcaggagcaggggaagcctctccaattcgccgccaacgaagtcgcccagtcagcccaggtcatccgctccgcggccgacgttgctgaaggcctcacggacgaaatcattgaagacagtgcggagaagaagatcgtcgtgcgacatatcccaatcggtgtcggcgcgggaatcattccctggaacttccctcacttactcaccgttgtcaagctggcgcccgctctgatcactgggaatgtgatcatcatcaagccatcgccattcacaccatattgtgggctcaagctcgttgagctggcgcagcggttcttcccgcccggtgtggtgcaggctctgagtggtgatgaccgcttggggccgtggttgacggcgcatcctgggattgggaaaataagctttacaggctcgtcggcgactggcaagaaggtcatggagagtgccagtaggactttgaagagagtcaccctggaattgggaggaaaggacgctgccatcgtgtgcggagacgttgacgttcaaagtgtcgcaccccgggtcatctcgaaagggttcttcaactctggccagatctgcctggctgtaaagcgaatctacgtccatgaatccatctacaatgagttccgcgacgctgcagtcgcgtacgccaaaactatcgaggtcggccctggcactcaagaaggcgtcttcatgggtccactgcaaaacagcatgcagtatgaaaaggtcaagggattctttgccgacctcacaaaggaacagctcagccttacccacccggacggcaaggcttttgacaacaaggctggctactttatcaagcccactatcattgacagaccagctgaggacagtcacattgctacggaggagcaattcggccctattatgcctctgttctcctggagtgatgagagtgatgtcattgcccgcgcaaacaatacacaaatgggtcttggggcatcggtctggtcgagggacctagaacaagcggcgagaattgcagcaaagctgcaggctgggagtgtttgggtcaacactcattttgaagctgacctcagggcgccgttcggtggacataaagagagcggcattgggacggagaatggcttgcagggtttgaggcagtggtgtaacttgcagactttgtatcttaagaactga

SEQ ID NO: 232 - protein, 503 aa, Aspergillus nidulans FGSC A4
MGLELRSMVLVSLARIYQTGFKVRRPLLAVATTNFQNIINGEKTSTTERRHGINPATGEPNPDVPVAIKEDVDRAVVAAQEAFKTWIDVPFDERRKALLAYADAIEEYVADFAKLLVQEQGKPLQFAANEVAQSAQVIRSAADVAEGLTDEIIEDSAEKKIVVRHIPIGVGAGIIPWNFPHLLTVVKLAPALITGNVIIIKPSPFTPYCGLKLVELAQRFFPPGVVQALSGDDRLGPWLTAHPGIGKISFTGSSATGKKVMESASRTLKRVTLELGGKDAAIVCGDVDVQSVAPRVISKGFFNSGQICLAVKRIYVHESIYNEFRDAAVAYAKTIEVGPGTQEGVFMGPLQNSMQYEKVKGFFADLTKEQLSLTHPDGKAFDNKAGYFIKPTIIDRPAEDSHIATEEQFGPIMPLFSWSDESDVIARANNTQMGLGASVWSRDLEQAARIAAKLQAGSVWVNTHFEADLRAPFGGHKESGIGTENGLQGLRQWCNLQTLYLKN

SEQ ID NO: 233 - DNA, 1506 bp, Candida albicans SC5314
  CDS (1)..(1506): transl_table=12
atgacaattcctttatcagtagatgttacattacccgatggtaaaaaattcactcaaccaaccggattatttattaataatgaatttattaaatccaaatcaggtaaaactttagaatcaattaacccaggtactagtgaaatcaatggagaagtatatgcagctgaatcagaagatattgattatgccgttgaatgtgctctgaaagcttttaaatcatggaaaaaaattactggagtagaaagagggaaatatttatataaattggctgatttagttgaacaacaacgtgatttattaggagctatggaagcatgggattcagggaaaactaaatctacaaatgctgttttcgatgttgatgaatgtattgctgttattagatatgcggcatcatgggctgataaaatcacgggcaaagtgattcaaaatgatccgaaaaaatttgcttatactattcatgaaccatggggggtttgtgcacaaattgttccttggaattatcctttacttatgtcaatgtggaaaatccctattgctgtggctgctggtaatactgtagttttgaaaactagtgaaatcacacctttaagtatgttatattttgctctgttggttaaacaagttggattcccaccgggagtcattaatattgtttcgggatttggtgctacagctggtgctgctttggccagtcataaaaaagttgccaaaattgcctttacaggttcaactgcaacggggaaaattattcaaaaattggcggctgaaaatttaaaggctgttactttagaatgtggtggtaaatctcctttaattattagatcagatgctgatattgatcaagcagttaaatggggtgccattggtattatgagtaatcaaggtcaaatttgtacatcaacatctcgtatttatgttcatgaatcaatttatgataaatttattgaagaatttgctgctcatgttaaactggattataaacaaggtgatgttttcgatgatgaagccgttgttggacctcaagtttctaaaatgcaacatgataagattttgaattatattgatattggtaaaaaagagggagcccgttgtgttcttggtggtgaaaaaaatattgaaggagaattatcaaaaggttattttgttaaaccgactattttcgctgatgttaaaccagaaatgagaattgttaatgaagaaatttttggtcccgttgttgttgttggtaaattttctactgatgaagaagctattacttatgctaatcaaaccgattatggattaggtgcagccattttcactaaagatatcactgctgctcataatatggctagtgatattgaagctggaatggtttggattaattcttcaaatgattcagattatcatgtaccatttggtggagtgaaaatgtctggtgttggtagagaattgggtgaatatgggttaaatatgtatactcaagctaaagctgttcatgttaaccttggaactaggttgtaa

SEQ ID NO: 234 - protein, 501 aa, Candida albicans SC5314
MTIPLSVDVTLPDGKKFTQPTGLFINNEFIKSKSGKTLESINPGTSEINGEVYAAESEDIDYAVECASKAFKSWKKITGVERGKYLYKLADLVEQQRDLLGAMEAWDSGKTKSTNAVFDVDECIAVIRYAASWADKITGKVIQNDPKKFAYTIHEPWGVCAQIVPWNYPLLMSMWKIPIAVAAGNTVVLKTSEITPLSMLYFASLVKQVGFPPGVINIVSGFGATAGAALASHKKVAKIAFTGSTATGKIIQKLAAENLKAVTLECGGKSPLIIRSDADIDQAVKWGAIGIMSNQGQICTSTSRIYVHESIYDKFIEEFAAHVKSDYKQGDVFDDEAVVGPQVSKMQHDKILNYIDIGKKEGARCVLGGEKNIEGELSKGYFVKPTIFADVKPEMRIVNEEIFGPVVVVGKFSTDEEAITYANQTDYGLGAAIFTKDITAAHNMASDIEAGMVWINSSNDSDYHVPFGGVKMSGVGRELGEYGLNMYTQAKAVHVNLGTRL

SEQ ID NO: 235 - DNA, 1530 bp, Candida albicans SC5314
  CDS (1)..(1530): transl_table=12
atgattacaaagagattgtattcaactattgagtcttccaaaaaagtattaggaacactttcgaaccctaatcttgtgaaaactgaagcatatatcaatggcaaatgggtccccagttcatccggggaaacctttactgtgaccaacccagcattgtatccaaatcctgaaagtgaattggcaaccatgcaatctatgtcagaagaagattttaactctgctatagaatcagcagatattgcgtttaacaaattcaaaaagactacaggtaggtatcggtctgaactacttttaaaattatacaatttgatgatttccaacaaagacgatttggccaaattggtggttttagaaaatgggaaaccttatgctgatgccttgggtgaagtcaattacgcagcatcatttttccaatggttctctgaagaagctccccgtatttatggtgatattatcccctctgctaatgggactaatagaatcttgacctttaaacaaccaattggagtttgtggtattttgactccttggaatttcccattggcgatgattacacgtaaattaggtgcagcaattgctactggttgtactgcagttatcaagccagcttcagaaacaccattgtcggctactgccttggcatttttagctgaggaggccggatttccaccaggagttattaatgtattaccatctgctgatgcttctggtctgggtaaatacttaactgaacatcctttgattaaaaaagtatcatttaccggatcaacaccagtaggtaagattttgatgaatcaatcagcatcaacattaaagaagctttcatttgaattgggtggtaatgctccatttattgcctttgatgatgttgatgttgacaaagctgtcaatggggcaattgcttcaaaattcagatctagtggtcaaacatgtgtttgtgctaatagaatttttgttcatgagaaaatctatgatgaatttgctaagaaatttgttgataaattgaaaaatgaaactgttttggggaatccgcttgcttctggtgtaactcatgggccagttattcatgacagatcaatgaaaaaagtcagacaacacattgaagatgcagttgataaaggtgcaaccattttacttggaggttccaagcgtcctgatttgggtgagaatttccatgatttgactgttttgggtgatgtcactactgaaatgttgatcacacaagaggaaacgtttggtcccgtggcaccattgattaagtttaagactgatgatgaagttataaaaatggccaatgacactactgttggacttgctggttatttctatgcaaatgacgtggccaaagtttttaagattgcagaagcacttaatgtgggtatgttgggtgtgaatactggagctatatctgaagcagcattgccgtttggtggtgttggcgagtctggttttggtagagaagggtccaagttcggagtcgaagattatttggttattaagagtgccgtactaggtggaattgaaaattag

SEQ ID NO: 236 - protein, 509 aa, Candida albicans SC5314
MITKRLYSTIESSKKVLGTLSNPNLVKTEAYINGKWVPSSSGETFTVTNPALYPNPESELATMQSMSEEDFNSAIESADIAFNKFKKTTGRYRSELLLKLYNLMISNKDDLAKLVVLENGKPYADALGEVNYAASFFQWFSEEAPRIYGDIIPSANGTNRILTFKQPIGVCGILTPWNFPLAMITRKLGAAIATGCTAVIKPASETPLSATALAFLAEEAGFPPGVINVLPSADASGSGKYLTEHPLIKKVSFTGSTPVGKILMNQSASTLKKLSFELGGNAPFIAFDDVDVDKAVNGAIASKFRSSGQTCVCANRIFVHEKIYDEFAKKFVDKLKNETVLGNPLASGVTHGPVIHDRSMKKVRQHIEDAVDKGATILLGGSKRPDLGENFHDLTVLGDVTTEMLITQEETFGPVAPLIKFKTDDEVIKMANDTTVGLAGYFYANDVAKVFKIAEALNVGMLGVNTGAISEAALPFGGVGESGFGREGSKFGVEDYLVIKSAVLGGIEN

SEQ ID NO: 237 - DNA, 1500 bp, Candida albicans SC5314
  CDS (1)..(1500): transl_table=12
atgtttaaaaaggccttaccattagtcagcaagctcacaacaccaaaaggtatcacttataaccaaccccttgggttattcatcaataacgaatatgttcacccaaagcaacaaaagacatttgaagttatttctccatccactgaagaaaaaataactgatgtttacgaagctttagaagaagatattgatactgctgttgaagccgcacaagccgcataccacaatggttgggctcaagggccaccagaacaaagatcaaaagttttgttcaaattagccgacttgattgaagaaaatgccgaattattagctcaaattgaaacttgggacaacggtaaatccttacaaaatgccagaggtgatgttgccttgacagctgcttacttcagatcctgtggtggttgggccgacaaaattttgggttcccaaatcaatactggtaacactcatttcaactacactcaaagagtcccattagtctgtggtcaaattattccttggaatttcccattattgatggcttcttggaaattgggaccagttcttgctactggttctaccactgttttgaagactgctgaatccaccccattatctgctttatatctttcccaattgttagtcgaagccggtatgccaaaaggtgttatcaacattgtttctggttttggtgctactgctggtgctgccattgctaaacatccaaagattgaaaaagttgctttcactggttctactgccaccggtaaaattatcatgaaattggctgctgaatcaaacttgaaaaaagttactttggaattgggtggtaaatctccaaacattgttttcaacgatgctgatttggacaagactattcaaaacttgattgtttctatcttctacaattctggtgaagtctgttgtgctggttctcgtcttttgattcaatccggtgtttacgaccaagttgttgaaaaattcaaagaagctgctgaaagtgtcaaggttggtaacccattcgacgaagacacttttatgggtgcccaagtttctgacgtccaattgtccaaaattttgaaatacgttgaatctggtaaatctcaaggtgctactgttgttaccggtggtgctagagctgatggtaaaggttactttgtcaaaccaactattttcgctgatgtcaagaaagatatggatattgtcagagaagagatctttggtccagttgtcactttgatcaaatttgatactgttgacgaagccgttgaattggccaatgattccgattatggtttggctgctggtattcactctgctgacgttaacaaatgtattgatgtggccaacagagttaaagccggtactgtttgggtcaacacttataacgatttccacccaatggttccattcggaggattcagtgcttcaggtatcggtagagaaatgggtgaagaagttttgcatgaatacactcaagtcagagctgtgagaatgaaaatcaacccaccaaactaa

SEQ ID NO: 238 - protein, 499 aa, Candida albicans SC5314
MFKKALPLVSKLTTPKGITYNQPLGLFINNEYVHPKQQKTFEVISPSTEEKITDVYEALEEDIDTAVEAAQAAYHNGWAQGPPEQRSKVLFKLADLIEENAELLAQIETWDNGKSLQNARGDVALTAAYFRSCGGWADKILGSQINTGNTHFNYTQRVPLVCGQIIPWNFPLLMASWKLGPVLATGSTTVLKTAESTPLSALYLSQLLVEAGMPKGVINIVSGFGATAGAAIAKHPKIEKVAFTGSTATGKIIMKLAAESNLKKVTLELGGKSPNIVFNDADLDKTIQNLIVSIFYNSGEVCCAGSRLLIQSGVYDQVVEKFKEAAESVKVGNPFDEDTFMGAQVSDVQLSKILKYVESGKSQGATVVTGGARADGKGYFVKPTIFADVKKDMDIVREEIFGPVVTLIKFDTVDEAVELANDSDYGLAAGIHSADVNKCIDVANRVKAGTVWVNTYNDFHPMVPFGGFSASGIGREMGEEVLHEYTQVRAVRMKINPPN

SEQ ID NO: 239 - DNA, 1500 bp, Candida albicans SC5314
  CDS (1)..(1500): transl_table=12
atgtttaaaaaggccttaccattagtcagcaagctcacaacaccaaaaggtatcacttataaccaaccccttgggttattcatcaataacgaatatgttcacccaaagcaacaaaagacatttgaagttatttctccatccactgaagaaaaaataactgatgtttacgaagctttagaagaagatattgatactgctgttgcagccgcacaagccgcataccacaatggttgggctcaagggccaccagaacaaagatcaaaagttttgttcaaattagccgacttgattgaagaaaatgccgaattattagctcaaattgaaacttgggacaacggtaaatccttacaaaatgccagaggtgatgttgccttgacagctgcttacttcagatcctgtggtggttgggccgacaaaattttgggttcccaaatcaatactggtaacactcatttcaactacactcaaagagtcccattagtctgtggtcaaattattccttggaatttcccattattgatggcttcttggaaattgggaccagttcttgctactggttctaccactgttttgaagactgctgaatccaccccattatctgctttatatctttcccaattgttagtcgaagccggtatgccaaaaggtgttatcaacattgtttctggttttggtgctactgctggtgctgccattgctaaacatccaaagattgaaaaagttgctttcactggttctactgccaccggtaaaattatcatgaaattggctgctgaatcaaacttgaaaaaagttactttggaattgggtggtaaatctccaaacattgttttcaacgatgctgatttggacaagactattcaaaacttgattgtttctatcttctacaattctggtgaagtctgttgtgctggttctcgtcttttgattcaatccggtgtttacgaccaagttgttgaaaaattcaaagaagctgctgaaagtgtcaaggttggtaacccattcgacgaagacacttttatgggtgcccaagtttctgacgtccaattgtccaaaattttgaaatacgttgaatctggtaaatctcaaggtgctactgttgttaccggtggtgctagagctgatggtaaaggttactttgtcaaaccaactattttcgctgatgtcaagaaagatatggatattgtcagagaagagatctttggtccagttgtcactttgatcaaatttgatactgttgacgaagccgttgaattggccaatgattccgattatggtttggctgctggtattcactctgctgacgttaacaaatgtattgatgtggccaacagagttaaagccggtactgtttgggtcaacacttataacgatttccacccaatggttccattcggaggattcagtgcttcaggtatcggtagagaaatgggtgaagaagttttgcatgaatacactcaagtcagagctgtgagaatgaaaatcaacccaccaaactaa

SEQ ID NO: 240 - protein, 499 aa, Candida albicans SC5314
MFKKALPLVSKLTTPKGITYNQPLGLFINNEYVHPKQQKTFEVISPSTEEKITDVYEALEEDIDTAVAAAQAAYHNGWAQGPPEQRSKVLFKLADLIEENAELLAQIETWDNGKSLQNARGDVALTAAYFRSCGGWADKILGSQINTGNTHFNYTQRVPLVCGQIIPWNFPLLMASWKLGPVLATGSTTVLKTAESTPLSALYLSQLLVEAGMPKGVINIVSGFGATAGAAIAKHPKIEKVAFTGSTATGKIIMKLAAESNLKKVTLELGGKSPNIVFNDADLDKTIQNLIVSIFYNSGEVCCAGSRLLIQSGVYDQVVEKFKEAAESVKVGNPFDEDTFMGAQVSDVQLSKILKYVESGKSQGATVVTGGARADGKGYFVKPTIFADVKKDMDIVREEIFGPVVTLIKFDTVDEAVELANDSDYGLAAGIHSADVNKCIDVANRVKAGTVWVNTYNDFHPMVPFGGFSASGIGREMGEEVLHEYTQVRAVRMKINPPN

SEQ ID NO: 241 - DNA, 1476 bp, Candida albicans SC5314
  CDS (1)..(1476): transl_table=12
atggctcctaaattaaataacccaaatttatttcaaaataaaccatttattaatggtcaatggtacgactccaaatcaacctccacttttaaagtctatgaccctgccactcaagaattaatcattgaattacctgaccaaaccccagaagaaattgatgaagccattgctattactcataaggcattccaaacttatcaacgtactcccgtttatgagcgtgctaaatggttaagaagaatgtatgaattgatgatagaaaatttacaagatttggctactttgattacttgggaaaatgggaaatgtttggctgatgccttaggggaaatcaaatatgctgctagttattttgaatggttttcagaagaatgtaaacgtaattatggtcataccatacaaccactgaatcaaaataataaagtcattacttataaacaaccagtgggtcccgtcggattattatgtccttttaatttcccaagtgctatgggagctagaaaagccgctccagcattagctgctggttgtacatgtattttgaaaccggatggtcaaactccattgagttcattggctttagcttatttagctcaacaagctggattccctgatggttgtttcaatgttgtattgacttctgtaaccaatactccaatgtgtggattgaaattttgtcaatcaccaaaattgaaaaaaatcagtttcactggatcaactaatgttggtaaattattaatgcaacaatcatcttcaactttgaaaaaattatcaatggaattaggtggtaatgctccgattattgttttcaatgattgtaatttagatcttgctgttgatcaaagtattacttctaaattcagatccttagggcaaacttgtgtttgtgccaatcgtatttatgttgaaaagggggtttatgatgaattttgtaataaatttgttgagaaagtaaatcaattcaaaattggtaatggatttgaaccaggtgtaactcatggttgtttgataaacactaaagccattgaaaaagttgaagatcatgttcaagatgccgttgaaaaaggagcaaaattgattgttgaaggaggtagattgccccaattgggagaaaatttctattccccttcagtagttaaggatgtgactcaagatatgaaggttgttaaagaagaaacttttggtcccttggcagctattatcccatttgattctaaagaacaagttttgcaatggtgtaatgatactccttatgggttggcatcatatatcttttcggaaaatttgaatactgtatggtatatgtcagaatttttggaaaatggtatggtttccgttaatactggattattcaccgatgctgcattgccatttggtggggttaaagaatcaggttttggtagagaaggttcactttatggaatggatgactataccgttattaaatcaattactttaggtaatgtctataactaa

SEQ ID NO: 242 - protein, 491 aa, Candida albicans SC5314
MAPKLNNPNLFQNKPFINGQWYDSKSTSTFKVYDPATQELIIELPDQTPEEIDEAIAITHKAFQTYQRTPVYERAKWLRRMYELMIENLQDLATLITWENGKCLADALGEIKYAASYFEWFSEECKRNYGHTIQPSNQNNKVITYKQPVGPVGLLCPFNFPSAMGARKAAPALAAGCTCILKPDGQTPLSSLALAYLAQQAGFPDGCFNVVLTSVTNTPMCGLKFCQSPKLKKISFTGSTNVGKLLMQQSSSTLKKLSMELGGNAPIIVFNDCNLDLAVDQSITSKFRSLGQTCVCANRIYVEKGVYDEFCNKFVEKVNQFKIGNGFEPGVTHGCLINTKAIEKVEDHVQDAVEKGAKLIVEGGRLPQLGENFYSPSVVKDVTQDMKVVKEETFGPLAAIIPFDSKEQVLQWCNDTPYGLASYIFSENLNTVWYMSEFLENGMVSVNTGLFTDAALPFGGVKESGFGREGSLYGMDDYTVIKSITLGNVYN

SEQ ID NO: 243 - DNA, 1494 bp, Ustilago maydis 521
  CDS (1)..(1494)
atgccaactctcaacctcgatctgcctaacggcatcaagtcgaccatccaggctgacttgttcatcaacaacaagtttgtgcccgctcttgacggcaagacttttgcgaccatcaacccttccaccggtaaggagattggtcaggtcgccgaggcttccgccaaggacgttgatctcgctgtcaaggctgcgcgcgaggcattcgagactacttggggcgagaacacacccggtgacgctcgtggcagacttctgatcaagctcgccgagctggtcgaggccaacattgacgagcttgctgccatcgagtcgctcgacaacggcaaggccttctcgatcgctaaaagctttgacgtcgctgccgtcgctgccaacttgcgatactatggtggctgggccgacaagaaccacggcaaggtcatggaggtcgacaccaagcgcctcaactacacgcgccacgagcccatcggcgtgtgtggtcagatcatcccttggaacttccccttgctcatgttcgcctggaagctcggccctgcgctcgccacaggtaacacgatcgtcctcaaaaccgccgagcagacaccactgtcagccatcaagatgtgtgagcttatcgtcgaggccggcttcccgcctggtgtggtcaacgtcatttccggtttcggtcccgtcgccggtgccgccatctcacagcacatggacattgacaagatcgccttcaccggctcaacactggtgggccgcaacattatgaaggctgctgcttcgaccaacctgaagaaggtgacgctcgagctcggcggcaagtcgcccaacattatctttaaggacgccgacctggaccaggcggttcgatggtcggcgttcggtatcatgttcaatcacggacaatgctgctgtgcgggctcgcgtgtctatgtggaggaatcgatctatgacgctttcatggagaagatgactgcccactgcaaggcgctccaggtgggtgaccccttttccgccaacacgttccaaggtcctcaggtttcgcagctccagtacgaccgtatcatggagtacatcgagtccggcaagaaggacgctaaccttgcgctcggtggtgtgcgcaagggtaacgaaggctactttatcgagcctaccatcttcaccgacgttcctcacgatgccaagattgccaaggaggagatcttcggccctgtcgtggtcgtctccaagttcaaagatgaaaaggacctcattcgcatcgccaacgactcgatctacggcctcgctgccgctgtcttcagccgcgacatcagccgtgccatcgagactgcccacaagctcaaggccggcaccgtctgggtcaactgctacaaccagctcatccctcaggttccgttcggcggttacaaggcgtccggtatcggtcgagagctcggcgagtatgcgctcagcaactacacaaacatcaaggcggtgcatgtgaacctcagccagcctgcccctatctaa

SEQ ID NO: 244 - protein, 497 aa, Ustilago maydis 521
MPTLNLDLPNGIKSTIQADLFINNKFVPALDGKTFATINPSTGKEIGQVAEASAKDVDLAVKAAREAFETTWGENTPGDARGRLLIKLAELVEANIDELAAIESLDNGKAFSIAKSFDVAAVAANLRYYGGWADKNHGKVMEVDTKRLNYTRHEPIGVCGQIIPWNFPLLMFAWKLGPALATGNTIVLKTAEQTPLSAIKMCELIVEAGFPPGVVNVISGFGPVAGAAISQHMDIDKIAFTGSTLVGRNIMKAAASTNLKKVTLELGGKSPNIIFKDADLDQAVRWSAFGIMFNHGQCCCAGSRVYVEESIYDAFMEKMTAHCKALQVGDPFSANTFQGPQVSQLQYDRIMEYIESGKKDANLALGGVRKGNEGYFIEPTIFTDVPHDAKIAKEEIFGPVVVVSKFKDEKDLIRIANDSIYGLAAAVFSRDISRAIETAHKLKAGTVWVNCYNQLIPQVPFGGYKASGIGRELGEYALSNYTNIKAVHVNLSQPAPI

SEQ ID NO: 245 - DNA, 1449 bp, Ustilago maydis 521
  CDS (1)..(1449)
atgactgttggcgttgcttccaagctgctcgatgcgcccttctcgcacgtcatcaatggcaagtcggttgacacccagggcttcaagacgctcgatgtgatcgaccctgccacggagaaagcgattgcccaggtacccattgccaccaaggaaaccgtggaccaggcggtcgatgctgcccacgccgctttcccctcttggtccaagaccacgtgggatgagcgtgctaagctgctcgaacagtatggcgaggagtacaaggcgatgctcccggagctcgtcaagctgctcacagctgagcagggcaagtcgattcaattcgcacagcatgaatgcgagacgatcctgccttggttcactgagcttgcaaaggtgcgtctcgacgagaaggtcgttcacgagaatgacacacacaaggcaatcgaaagatacgttccgctgggtgtgtgcgccggtattgtcccctggaacttccctgttctcctcatgctctggaaagtgactcaggccatcgtcaccggaaactgcatcatcatcaagccatcacctttcacgcctctctgcgacatccgcatcatcgaagcggcgcaaaaggtcttccctcccggcgttgtccagatcgtggtgggtgacgacaacctcggtccctggatcactgaacaccctcgtatccagaaaatctccttcaccggcagtaccgctaccggcaaactcgtggccaagagctgctctgccaccctgaagcgatttacgctcgagcttggaggcaacgatcctcttgtcgttctgccgcaacagaaagatcttgctgctacagcgcagaatgtgctgttggctgcgtttttcaacagcggtcaggtctgcattgctgcaaagcgtatctacatccacgaagacatctacgacgagttcaaagccacgctggcgcaggtagtgcagcacttcaaggtgggtcctggtaatgaggaaggtgtcatgtttggtcccatcaacaacaagatgcagtacaacaaagtgggcgaattcttcgaggaggccaaaaagaacaacttcaaccttgtcgctggtggccaagtggaagagaagccgggcttcttctatccactcaccattgtcgacaaccctcccgagaacagccgactcgttcaggaggagcccttcggtccgatcgttcccctgctcaagtggaaggacgaagccgatttggtcaagcgcatcaacgactcgcaatggggtctcggggcgtctgtgtggtcatctgatatccaggctgccgagcgcatcggtcgacaaatcgagagcggcaccatctggatcaactgtcttgtccatcatcaccccgctgtgccctttggcggtttcaagagctccggtatcggcgctgagcacggcaagaacggcttgggcgcatactgccaggtccaagcactctggatccccaaagcctga

SEQ ID NO: 246 - protein, 482 aa, Ustilago maydis 521
MTVGVASKLLDAPFSHVINGKSVDTQGFKTLDVIDPATEKAIAQVPIATKETVDQAVDAAHAAFPSWSKTTWDERAKLLEQYGEEYKAMLPELVKLLTAEQGKSIQFAQHECETILPWFTELAKVRLDEKVVHENDTHKAIERYVPLGVCAGIVPWNFPVLLMLWKVTQAIVTGNCIIIKPSPFTPLCDIRIIEAAQKVFPPGVVQIVVGDDNLGPWITEHPRIQKISFTGSTATGKLVAKSCSATLKRFTLELGGNDPLVVLPQQKDLAATAQNVLLAAFFNSGQVCIAAKRIYIHEDIYDEFKATLAQVVQHFKVGPGNEEGVMFGPINNKMQYNKVGEFFEEAKKNNFNLVAGGQVEEKPGFFYPLTIVDNPPENSRLVQEEPFGPIVPLLKWKDEADLVKRINDSQWGLGASVWSSDIQAAERIGRQIESGTIWINCLVHHHPAVPFGGFKSSGIGAEHGKNGLGAYCQVQALWIPKA

SEQ ID NO: 247 - DNA, 1566 bp, Ustilago maydis 521
  CDS (1)..(1566)
atggactcatcgcatggtacaacaagccgtagccccgagccggttaccatctcgactccaacaggcaaccagtggcaagttccgtcgggcatctttatcaacaatagctttcacgcgtcggtctctggcaagacatttgactcgatcaatccggccacgggcgaaaagctctgtacgctcgctcttggtggcgctgccgacattgaagcagccgtgaaggcagctcgaactgcattcaagacgacatggggcaaaaaatcgacgcctacgcaacgatcacagctgctgctcaagtttgctgacctggtggacaagaacctcgacgaactggccgagctggaaagcatggacaacggaaagcctgtttggatggcgagcagcttcgacgttcctgattctgccgcgtgtctgcgctactacggtggcttagcggacaagatcgagggcaaaaccatcgagcagaccgaaggagaaaagatcgcctacacgcgcatcgagccgcttggtatctgcggtcagatcatcccgtggaattatcccattcaaatggctgcttggaagttaggacccgcgttggcagcgggcaactgtgtcatcctcaagcccgccgaacagacgccgttgacagcactcaagcttgcccaactctcggttcaggctggtttcccagccggtgtgatctcggttgtcaacggttatggtgccgaagtgggcgaggcaatctcgaggcacatggacatccaaaaggtggccttcaccggttctactgccacgggcaagcgtatcatgaaggctgctgccgagagcaacatgaaaaaggttacgctcgaacttggcggaaagtcgcccgtggtggtgttcgagagtgccgatatccaacaggctgtgcgatgggtctgcttgggaatcctcttcaatcaaggccaagactgcaccgctggctcgcgtctctttgttcaagacaggatctacgagagttttatggagcagctcgtcgcagctttcaaggctcacaaagtaggcgatccatttcaccagcttacattccagggacctcaagtcagccagcagcaacaggaaaagatcctcgacatgatcgaatcaggcaagcgacagggcgccaaagtcgaggttggcggtcaagcgtggaagagcgcagattccaaattcaacaagggcttctttgttgagcccaccatcttttctggatgtcgcaaagggatgcgcatcgtcgatgaagagatcttcgggcccgttctggccgtagccaagttcagcacggaagaagaagcgatccgacttgccaacgagaccgtttacggtctaggagctggcgtcttctccgagaatgccagtcaaatccagcgtatggtatcggcgatcgatgcaggcaccgtatgggtgaacaactacgtggcgctgagcaattcggtgccattcggtggaatgaaggcgagtggattcggtcgagagctcggtgtggatgccatcaaggcctactgtgatgtcaaggcgattcactggaactatggcgagaagctcgattggccgcttcccaaactgtaa

SEQ ID NO: 248 - protein, 521 aa, Ustilago maydis 521
MDSSHGTTSRSPEPVTISTPTGNQWQVPSGIFINNSFHASVSGKTFDSINPATGEKLCTLALGGAADIEAAVKAARTAFKTTWGKKSTPTQRSQLLLKFADLVDKNLDELAELESMDNGKPVWMASSFDVPDSAACLRYYGGLADKIEGKTIEQTEGEKIAYTRIEPLGICGQIIPWNYPIQMAAWKLGPALAAGNCVILKPAEQTPLTALKLAQLSVQAGFPAGVISVVNGYGAEVGEAISRHMDIQKVAFTGSTATGKRIMKAAAESNMKKVTLELGGKSPVVVFESADIQQAVRWVCLGILFNQGQDCTAGSRLFVQDRIYESFMEQLVAAFKAHKVGDPFHQLTFQGPQVSQQQQEKILDMIESGKRQGAKVEVGGQAWKSADSKFNKGFFVEPTIFSGCRKGMRIVDEEIFGPVLAVAKFSTEEEAIRLANETVYGLGAGVFSENASQIQRMVSAIDAGTVWVNNYVALSNSVPFGGMKASGFGRELGVDAIKAYCDVKAIHWNYGEKLDWPLPKL

SEQ ID NO: 249 - DNA, 1539 bp, Ustilago maydis 521
  CDS (1)..(1539)
atgtctaccaccatcgccgatagcgccaccatcaactttatcaaccaaccaaccctcccctgcattgtcgacaatgcgcccttcaccccttcgcacacctatgcggtctatcgcaccgatcaaccgtccacgtcatctcgtgaggtaacccacaaggtgcacagcatcgccgtttcggacgtagaccatgtggttgcttcgtcgcaggctgccttgcccggatggcgggcgacgccagtctcacgacgtcgcgagattctgctgaaagcatgttcgcttctgctcgaacgtgtccccgagtatgctgccaacacgatggctgaaacggtactttctcgaggaatggcaggattcgagctcgcggtgcttgcgacgggtcacatccagtcggctgctgagagcatgactcacgcgctcaagagcgaggtgttgccgccgggtgacgatggtgccatgaagatcgtcaagcgcgaaccttttggtgtggtactgggaattgcgccctggaacgcacctttcattttggggttgcgatcggtgctctacgctatcgctgcgggtaacacggcgatcctcaagacgtccgagttcgctcctcgagtccacctgagtgttgcgcagcttctcatcgatgccggcttgcccaagggtgtgctcaacgttgtgcacgtcgaccccgcacatgcacctcaagtcaccgaggcattggtgggtcacccgcgcgtccgcaagatcaacttcaccggctccacacgtgtcggtcgaatcatcgcctccaccgctgccaaatacctgaaaccggtcgtgctcgaattgggcggcaaggcacctctgatcgtcctcgaggatgcggatctggacctggctgccaacggcatcttgttcggaggctatttgaacagcaatcagatctgcatgtctgtcaacaatgttctcgtccactcgtcggtggctgcgaaactcgagcagacgctgcgcgcgctgtttgatgcccaccgcgatatcttcaccgccaagctcgcgcagggcatgcaggacaagcatgcgctacgatcactgttcaccgctgcgtcggcggacaggctcaaggtgctctacgatgacgcaatcagcaagggtgccaaggtggtcgttggagatgctggatttgatggtgcgctggttcaaccaatcgtgctcgctcccgttgacaagagcatgaagatctataccgaagaaactttcggtcctgtgctttccatcatcacattcgactcgatcgaccaggccgtcgagatcgcaaacacccccgaatacggtctcgccgcttccgtgtacaccaagaaccaaaccttgggtctcgaactcgcagaccgcatcgacgccggccaggtccacatcaacgcccaaagcgtccacgacgaccccgtcatgccccacggcggctggaaaaattccggctacggcagattcaacggcgtcgaaggcgtcagagagttcacccagaccaaaggtatcaccctccaacacggtcatcccacacccttccaatacgtctaa

SEQ ID NO: 250 - protein, 512 aa, Ustilago maydis 521
MSTTIADSATINFINQPTLPCIVDNAPFTPSHTYAVYRTDQPSTSSREVTHKVHSIAVSDVDHVVASSQAALPGWRATPVSRRREILLKACSLLLERVPEYAANTMAETVLSRGMAGFELAVLATGHIQSAAESMTHALKSEVLPPGDDGAMKIVKREPFGVVLGIAPWNAPFILGLRSVLYAIAAGNTAILKTSEFAPRVHLSVAQLLIDAGLPKGVLNVVHVDPAHAPQVTEALVGHPRVRKINFTGSTRVGRIIASTAAKYLKPVVLELGGKAPLIVLEDADLDLAANGILFGGYLNSNQICMSVNNVLVHSSVAAKLEQTLRALFDAHRDIFTAKLAQGMQDKHALRSLFTAASADRLKVLYDDAISKGAKVVVGDAGFDGALVQPIVLAPVDKSMKIYTEETFGPVLSIITFDSIDQAVEIANTPEYGLAASVYTKNQTLGLELADRIDAGQVHINAQSVHDDPVMPHGGWKNSGYGRFNGVEGVREFTQTKGITLQHGHPTPFQYV

SEQ ID NO: 251 - DNA, 1827 bp, Ustilago maydis 521
  CDS (1)..(1827)
atgtcgaccacccccatacactctacaagaaacctcttgcgagcctttccatctcgtatcttgcctttactaacgaccactgctgaaactaaagccaaaaccaaaaccaaagccgtcaccgtcgtaccgcccagtctgagtttgaatttacagcgtccgcgtcgattccaacctatttcgccacttgcggtcccacgtcgtaccgccaccacatctagcaaaatcgatccggctgcaattgcgtcccagttgagcagcatgccgtccacatccaaaaccccggcgtccgagccaacgctcttcattgacggaaaatggactcacgctaaagcaggtcacactcgaccgatcatcaacccctttgacggctccactgtagccgtcatcgacgaggccggtagtgaggatgcactagctgctgtcgattccgccgcgcgattcttccgcacctcatcttggccgcatcagacgtgcacttcacgtaccgctcttctctcgaaagtagcagacctcctccagcgagacaaagagatccttgccgagatcgaaaccaaggacacgggcaagacactccaagagagcaaagtcgatgtcgacgacgtcaccaacgtctttcgattctacgctcaggaagccaaaaagctcgatacacccaaaaagattgtctcggatgtgatccctgactcggtggagagcaccacttcgcacgttcctgtgggcgtgtgtgtgctgatcgcaccgtggaactaccctttgcttcagatctgctggaaggtagcaccggcgctggttacaggcaacgccgtcatcatcaagccttccgaagtgacgccgctatcaacggtgcatttcgtcaagctactggtggaggctggagcaccgatgggttcggttcagttgctcaccgctggaggtgcgtcggtcggcccggctttgaccgaacatgccgacgtggatctggtctccttcacaggtggactggacaccggacgtcgaatcattgcttcgtgcgcaactacggtcaagcgatgcacggttgaactgggtggcaagaaccctaacattgtgtttgccgactgcgaccttgaatgggccatcgataccgtcaccaccgccgtgtttttgcactcgggccaagtgtgctcttcgggtgcgaggttgatcgtagaagagtcgatcgcagataagctcgtcgctggcgtagctgagcgtgccaaacgtatcaagatgggtaacggtctggacgcggcatccgaaactggaccactcgtctctgctgctcacttgtccaaagtggaagcgtatgtgcaactcggtctcgaggaaggcgccaagctggtatgtggcggagcacgaccagatgccaagtcgcacccggaactggccaacggcttctttttctgcccgaccatctttgaccgctgccatcgcgagatgcgcattgtgcaggaagagacgtttggaccgatcctgacggtggaaaggttcaaggacggcgatgaggagcacgccatctggctcgccaacgacaccaagtatggactcgcaggaggtgttcagtcgggcaatcaggaacgcgccaggagagtggccaagaggctgaggcacggaaccgtatgggtcaacacctatggatcctacacgccagcggctgaatggggtgggtttggcatgagcggcaacggacgcgaactcggcagcaaaggcttggatgagtacatcgagaccaaacacgaatgggtcgagaccaaaccagcgccgcccggatggttcaagggacaagccgaggttttgcagcctgccaacgtggtcaaggcgaagctgtag

SEQ ID NO: 252 - protein, 608 aa, Ustilago maydis 521
MSTTPIHSTRNLLRAFPSRILPLLTTTAETKAKTKTKAVTVVPPSLSLNLQRPRRFQPISPLAVPRRTATTSSKIDPAAIASQLSSMPSTSKTPASEPTLFIDGKWTHAKAGHTRPIINPFDGSTVAVIDEAGSEDALAAVDSAARFFRTSSWPHQTCTSRTALLSKVADLLQRDKEILAEIETKDTGKTLQESKVDVDDVTNVFRFYAQEAKKLDTPKKIVSDVIPDSVESTTSHVPVGVCVLIAPWNYPLLQICWKVAPALVTGNAVIIKPSEVTPLSTVHFVKLLVEAGAPMGSVQLLTAGGASVGPALTEHADVDLVSFTGGLDTGRRIIASCATTVKRCTVELGGKNPNIVFADCDLEWAIDTVTTAVFLHSGQVCSSGARLIVEESIADKLVAGVAERAKRIKMGNGLDAASETGPLVSAAHLSKVEAYVQLGLEEGAKLVCGGARPDAKSHPELANGFFFCPTIFDRCHREMRIVQEETFGPILTVERFKDGDEEHAIWLANDTKYGLAGGVQSGNQERARRVAKRLRHGTVWVNTYGSYTPAAEWGGFGMSGNGRELGSKGLDEYIETKHEWVETKPAPPGWFKGQAEVLQPANVVKAKL

SEQ ID NO: 253 - DNA, 1482 bp, Ustilago maydis 521
  CDS (1)..(1482)
atgatgaataccaagctcaaagatctttcgctgctggaagcctctgactttctcaaggctccggacagtcttgatacatctgacaacgaatcgtttgatgtgatggacccaggctcgggaaggccgatatgccgcttgacggcctctaacctcaaagacgtggactatgccattcaggccgcaagccaagctttcccgtcgtattcggcaatcccggccagagaacgcgcgatgctgctgctgaatttcgataagctcatccgtgacaatctcgacgatcttgcttggattctggtctacgagacgggcaaaccgttggaagaggcacgagcagaggtgcagtatgcgctcactttcagctggtggtacgttggagagaccgaacgtgtgcaaggtcaagtggtcaagagcgccaccaatccttctctacgctacttgacggtgtggcaacccgtcggccctgtggcaatcctgacgccctggaactttcctgtggcgctcttcgtccgcaaagcagtcagtgccctcgcagccggatgcacaattgtcgccaaaccatcacctgaaacgcctctctcgacacttgcggttgccaacttgctccatcgcgctggtttcccctctggctccgtcaacattgtcctggcatcctatcggaataccccggccatcggccaggccctttgcactgatctgcgtatcaagaagctcagcttcacaggtagtacccgtgtaggccgactactgatgcaacagtgtgcaccaaccctcaagaagctaacgcttgaactaggtggccttggtgcgtacctcatcttcgacgacgctgacatcgaggcagctgccacagcacttgtcgccaataaattgcgacacgcaggccagacctgcatctcggcgcagaggacttttgtgcatgagtccatcgtcgatagagtgctcaagtgcatcatagaactgctggatcgtgtaacgctcggacacggtgcccaaccatctacgacactcggaccactgcagaccgaacgaagtcagcaaaaggttcgcgagcatatcgaagacgccagagctaaaggcgccacagtttatacgtcaaaagctgctgtgccgagctctggatactttgttgcgccgaccctgatcgtaggatgcaccgctgaaatgcttgtcttccaagaggagtcgtttggtccactcatcagcctgacgagcttcgccacagagcaggaggctgtagcactggccaataagactgatatgggcctgacttcttacgtatttaccaaggactcggcgcggctttggcgaatgtttgagcagctcaaggccggtaatgtcggactgaatgtcggcggcagtaccacggcggccgagatcccatttggcggtgtcgaccagtcagggttcggaaaggaagccggaatcggcgccggccttaaggagtatatggtcgagaagtcggccaccatgtcgatagcataa

SEQ ID NO: 254 - protein, 493 aa, Ustilago maydis 521
MMNTKLKDLSLLEASDFLKAPDSLDTSDNESFDVMDPGSGRPICRLTASNLKDVDYAIQAASQAFPSYSAIPARERAMLLLNFDKLIRDNLDDLAWILVYETGKPLEEARAEVQYALTFSWWYVGETERVQGQVVKSATNPSLRYLTVWQPVGPVAILTPWNFPVALFVRKAVSALAAGCTIVAKPSPETPLSTLAVANLLHRAGFPSGSVNIVLASYRNTPAIGQALCTDLRIKKLSFTGSTRVGRLLMQQCAPTLKKLTLELGGLGAYLIFDDADIEAAATALVANKLRHAGQTCISAQRTFVHESIVDRVLKCIIELLDRVTLGHGAQPSTTLGPLQTERSQQKVREHIEDARAKGATVYTSKAAVPSSGYFVAPTLIVGCTAEMLVFQEESFGPLISLTSFATEQEAVALANKTDMGLTSYVFTKDSARLWRMFEQLKAGNVGLNVGGSTTAAEIPFGGVDQSGFGKEAGIGAGLKEYMVEKSATMSIA

SEQ ID NO: 255 - DNA, 1506 bp, Ustilago maydis 521
  CDS (1)..(1506)
atgccgcacatgccccaagggatcgtcaagggcggcaaggaagacgtcaagctcaacaatcagtctctttggcagacaaaggcctacatcaacggagtatggaccgatgctgacaacaaatccaccctcaaggtgttcaacaaagccaccggcgccgagatcggtcaggtgccagacatgggcgccaacgagaccgcggccgccatcagcgctgctgacgaggctttcaagtcttggtccaagaccaccgccaaacaccgccacgacttgctcatgaagctctattatgcccaccaggagaacgctgaagaccttgctaagatcattgtagccgaaaacggaaaagcgctgccagaggccaagggcgagataagctactcaaatggttttctcgagtggtttgccgaggaggctacgcgtacctacggacacactgtgccctcgcctctccctggcgttcgcaacgtcgtgcagatgcagcctgttggtgtcgctggtctcatcactccttggaacttccctgccgccatgatcacgcgcaaagcagctcctgcgctcgctgcgggatgtaccgtcgttgtcaaggcgcccgctgaaacacccttctctgcacttgccttcgcccacctggccgagaaggtcggcttccccaagggcaccatcaacgtcgtcacctgtgccaagggggacaacgaaattgctgtcggcaagcaactctgcgaaaaccccgctgtgcggaaaatctcgttcaccggctccacccgcgtcggaaaaattcttatgagccaatccgcctcgactctcaagaagctctctatggagctcggcggtaacgctcccttcattgtgtttgaggatgccgatcttgacaaggcggtcgagggtgcgatcgcctgcaagttccgaggctcgggtcagacttgcatctgtgccaaccgaatctacgttcatgccagcatcaaggatgagtttcttcagaaactcgccgccaaggtcaatgacttcaaggtcggctacggcatggacaaaggcacgacgcacggcccactcgtcagcgaggccggtctcagcaaggtcgaagagcacgttaacgattcggtcaagaagggcgccaaagtcattgtcggtggaaagcgcggcgaaggcctcttcttcgagcccaccatcatcaccgacctgcccgaagacgttcctaccgaccgcgaagaaacgtttggccctcttgccgccgtgtacacattcactagcgaacaagaggtggtacgaaaggctaacaacgtcgacgtcggtctggctggctactttttctccaaagacacggcacgctgctggcgtgtcgccgaggagctccaagtcggtatggtcggcatcaacaccggcctcatctcgcaacacgccgtcccctttggcggcgtccacgaatccggttttggacgcgagggtggtcgcactggcatcgacgagtaccttgtacagaagctgatggtatttggcggcgtcaattga

SEQ ID NO: 256 - protein, 501 aa, Ustilago maydis 521
MPHMPQGIVKGGKEDVKLNNQSLWQTKAYINGVWTDADNKSTLKVFNKATGAEIGQVPDMGANETAAAISAADEAFKSWSKTTAKHRHDLLMKLYYAHQENAEDLAKIIVAENGKALPEAKGEISYSNGFLEWFAEEATRTYGHTVPSPLPGVRNVVQMQPVGVAGLITPWNFPAAMITRKAAPALAAGCTVVVKAPAETPFSALAFAHLAEKVGFPKGTINVVTCAKGDNEIAVGKQLCENPAVRKISFTGSTRVGKILMSQSASTLKKLSMELGGNAPFIVFEDADLDKAVEGAIACKFRGSGQTCICANRIYVHASIKDEFLQKLAAKVNDFKVGYGMDKGTTHGPLVSEAGLSKVEEHVNDSVKKGAKVIVGGKRGEGLFFEPTIITDLPEDVPTDREETFGPLAAVYTFTSEQEVVRKANNVDVGLAGYFFSKDTARCWRVAEELQVGMVGINTGLISQHAVPFGGVHESGFGREGGRTGIDEYLVQKLMVFGGVN

SEQ ID NO: 257 - DNA, 1497 bp, Bacillus licheniformis ATCC 14580
  CDS (1)..(1497): transl_table=11
ttgacaaacatgagttcattaacgatgcaggtcagtaagaagctggagtcatttttgcagggaacaaagaagctctatattaacggggaatttgtagccagcgcctcaaacaaaacgtttgagaccccaaacccggcgactggtgaaacgctcgccacgttatatgaagcaggtcccgaggatgtggacaaagctgtaaaagctgcgcgggaagcctttgaccgcggtgagtggcggacgatgaaccctgccgaaagaagccggctgatgtacaaactcgccgatctgatggaggaacataaaacggaactggctcagcttgaaacgctggataacggaaagccgatcagcgaaacgaccgcaggcgatattccgctgtcaattgaacatatgcgctattatgcgggctgggcgacgaaaataaccggacagacaattcctgttaacggaccttattttaactatacacggcatgagcctgtcggagttgtcgggcaaattatcccttggaacttcccgcttctgatggctatgtggaaaatgggagccgcccttgcagccggatgtacggttgtcttaaaaccggctgaacaaacgccgctttccgctctgtatttagctgagctgatcgatgaggcaggcttcccgaaaggcgtcatcaacatcatccctggctttggggagacggccggagaagctctgaccgaccatgcccttgtcgacaaactggcattcacagggtcaactgaaatcggcaaaaagataatggagaaagcggccaaatcggtcaaacgtgttacccttgagctcggcggaaagtcgccgaatatcatcctccctgacgccgacctgaagaaagcgattccaggcgcactaaccggcgttatgttcaaccagggccaagtttgctgtgcgggatcgcgcgttttcatccataaagaccaatatgacaaagtcgttgatgaaatggccgcttattcaaaatcgctccgccaaggtgcgggccttcatgaagacacgcaaatgggaccgcttgtcagcaaagaacagcatgaacgcgtcctctcgtatattgaaaaaggacgccaggagggtgcgaaaatcgcggccggcggaacatgcccttatgaacagggatactttgtttctccgactgtattcacaaatgtcgaggatgagatgacaatagcaaaagaagaaatcttcggtcctgttttggcggcgattccttatgaaacggttgatgaagtcatcgaacgggccaatcgcagcgaatacggcctcgctgcgggcgtatggacggaaaatttgaaaaacgcccactatatcgccgaccgtctgcaagccggtaccgtttgggtcaactgctataatgcttttgacgccgcatccccattcggcggctacaaacagtctggactcggacgtgaaatgggctcatacgctctggataactatacagaggttaagagcgtctggattcatacaggcgaataa

SEQ ID NO: 258 - protein, 498 aa, Bacillus licheniformis ATCC 14580
MTNMSSLTMQVSKKLESFLQGTKKLYINGEFVASASNKTFETPNPATGETLATLYEAGPEDVDKAVKAAREAFDRGEWRTMNPAERSRLMYKLADLMEEHKTELAQLETLDNGKPISETTAGDIPLSIEHMRYYAGWATKITGQTIPVNGPYFNYTRHEPVGVVGQIIPWNFPLLMAMWKMGAALAAGCTVVLKPAEQTPLSALYLAELIDEAGFPKGVINIIPGFGETAGEALTDHALVDKLAFTGSTEIGKKIMEKAAKSVKRVTLELGGKSPNIILPDADLKKAIPGALTGVMFNQGQVCCAGSRVFIHKDQYDKVVDEMAAYSKSLRQGAGLHEDTQMGPLVSKEQHERVLSYIEKGRQEGAKIAAGGTCPYEQGYFVSPTVFTNVEDEMTIAKEEIFGPVLAAIPYETVDEVIERANRSEYGLAAGVWTENLKNAHYIADRLQAGTVWVNCYNAFDAASPFGGYKQSGLGREMGSYALDNYTEVKSVWIHTGE

SEQ ID NO: 259 - DNA, 1506 bp, Burkholderia mallei ATCC 23344
  CDS (1)..(1506): transl_table=11
atgaacctggccgctctttcgacccagcatcaacgccaatccggctttctcgcccgccgccagttcggcaactggatcgacggccgcgccgccgagccgcgctcgggccgctatctgcccgtcgtcgatccggcgaccgagatgacgatcgcggaagtcgccgcgagcgacgcgcgcgatgtcgacgcggccgtggccgccgcgcgccgcgcgttcgattcgggcgactggccgcgcatgcggcccgcgagccgcgaaaagctgctgcatcagctcgccgagcgcctcgagcgctacgcggacgagctcgccgcgctcgagacgctcgaaaccggcaagctgatcggcgtcgcgcgcgcgatcgacgtgctgggcggcgccgagtacgtccgctacatggccggttgggcgacgaagctcgaaggctcgacgctcgatacatcgatcgccgcgcccgccggcgccgagtatttcgcgtatacgcgccgcgaggcggtgggcgtcgtcggcgcgatcgtgccgtggaattttccgctcgcgatcgcgttgtggaaggtcgcgaccgcgctcgcatgcggctgcacggtggtgctgaagccgtcggaggaaacgccgctcaccgcgctgcgcctgggcgagctcgcgcaggaagcggggctgcccgacggcgtgctgaacatcgtgacgggcgcgggcgccgaggcgggcgcggcgctcgccgcgcatccgggcatcgacaagatcaccttcacgggctcggtcggcgtgggccgcgcgatcggccacgcggccgtcgagcggatggcgcgcttcacgctcgagctcggcgggaaatcgccgctgatcgtcttggacgatgccgaccccgacttcgccgcgcatggcgcggcgcaaggcatcttcttcaatcaggggcaggtctgcacggcgggctcgcgcgtgtacgtgcaaaagcgcctgttcgagcgggtcgtcgccggcatcgccgcggccgccgaagcgatgaagatcggctcgggcttcgatccgaacacgcagatcggcccgctcgtgtcgaagcggcacttcgagcgcgtgctcggccacgtcgacgccgcgaaggaggagggcgcgacgctcgtcaccggcggcacgcgcgcgctcgacggcggctatttcgtgaagccgacggtgttcgtcgacgccgcgcctgcgatgcggatcgtgcgcgaggaggtgttcgggccggtcgtcacggtcacgccgttcgacacggtcgacgacgcggtgcggctcgcgaacgacaccgacttcgggctcgcggcgagcgtgtggtcgcagaacctgtcgcacgtgcatcgcgtcgtgccgcggctgaaggcgggcatcgtctgggtgaacacgcacaacatgctcgatcccaacctgccgttcggcggcttcaagcaatcgggctacggccgcgagctcggccgcgcggcgctcgaacagttcaccgagctcaaatccgtctgcatcgcgcattga

SEQ ID NO: 260 - protein, 501 aa, Burkholderia mallei ATCC 23344
MNLAALSTQHQRQSGFLARRQFGNWIDGRAAEPRSGRYLPVVDPATEMTIAEVAASDARDVDAAVAAARRAFDSGDWPRMRPASREKLLHQLAERLERYADELAALETLETGKLIGVARAIDVLGGAEYVRYMAGWATKLEGSTLDTSIAAPAGAEYFAYTRREAVGVVGAIVPWNFPLAIALWKVATALACGCTVVLKPSEETPLTALRLGELAQEAGLPDGVLNIVTGAGAEAGAALAAHPGIDKITFTGSVGVGRAIGHAAVERMARFTLELGGKSPLIVLDDADPDFAAHGAAQGIFFNQGQVCTAGSRVYVQKRLFERVVAGIAAAAEAMKIGSGFDPNTQIGPLVSKRHFERVLGHVDAAKEEGATLVTGGTRALDGGYFVKPTVFVDAAPAMRIVREEVFGPVVTVTPFDTVDDAVRLANDTDFGLAASVWSQNLSHVHRVVPRLKAGIVWVNTHNMLDPNLPFGGFKQSGYGRELGRAALEQFTELKSVCIAH

SEQ ID NO: 261 - DNA, 1455 bp, Silicibacter pomeroyi DSS-3
  CDS (1)..(1455): transl_table=11
atgaagttccagccagaagcgagccatttcatcaatggcgcctatgtcgaggacacggcaggcgccgtgatcgacgtgatctatcccgccaccggcgaagtgatcgcccggttgcactcggccacacccgcgatcatcgatcaggcgctcgaggccgcgcggcaggcgcaggcgcaatgggccgcgatgaccgggaccgaacgtggccgcatcctgcgccgcgccgccgacatcatgcgcgcccgcaaccacgacctgtcggtgatcgagacccatgacaccggcaaacccattcaggaaaccaccgttgccgatgccacctcgggcgccgatgcgctggagtacttcggcgggctggccgggtcgctgaccggcgagcatatcccgctgggcggcggtgatttcgcctataccgtccgtgaggcgctgggcgtctgcgtcggcatcggcgcctggaactatcccacccagatcgcctgctggaagggcgccccggcgctggcctgcggcaatacgatggtgttcaagccatcggaaaccacccctctttccgccctcaaggtcgccgagatcctgatcgaggccggggcgcccaagggtatctataacgttgtgcagggctatggcgatgtcggcgcgtccctggtcaccgatccgcgcgtcgccaaggtgtcgctcaccggttcggtccccaccgggcgccgggtctatgccgccgccgccgaaagcatcaagcacgtgacgatggaactgggcggcaagtcgcccttggtcgtgtttgacgacgccgatatcgaaaacgcggtctcgggcgccattctgggcaacttctattcctcgggtcaggtctgctcgaacgggacccgcgtgtttgtgcagaagggcatcaaggaggcgttcctgtcccgcctggccgagcgtctggcaacggcggtgatcggcgacccgatggacccggccaccaatttcgggccgatggtcagcgaggcgcagatgaacatcgtcctgggatatgtcgacaagggcaaggccgagggcgcccggctggtctatggcggcacccggctggatcgcgacgggttctacctgctgcccaccgtgtttgccgatgtgaccgatgacatgaccatcgcgcgggaagagattttcggcccggtcatgtcggtactcgacttcgacaccgaggaagaggtgttggagcgcgccaatgccaccgaattcggcctcgccgcgggcgtctttacccgcgacattacccgcgcccatcggatggtggccgggttcgaagcgggcacctgctatatcaacagctataacctggccccggtcgaggcgccctttggcggttcgaaacagtcgggcgtgggccgcgaaaactcgaaactggcgatcaaccacttctccgagatgaaaacagtgtttgtctcgatgaacgatatccaggcgccctactga

SEQ ID NO: 262 - protein, 484 aa, Silicibacter pomeroyi DSS-3
MKFQPEASHFINGAYVEDTAGAVIDVIYPATGEVIARLHSATPAIIDQALEAARQAQAQWAAMTGTERGRILRRAADIMRARNHDLSVIETHDTGKPIQETTVADATSGADALEYFGGLAGSLTGEHIPLGGGDFAYTVREALGVCVGIGAWNYPTQIACWKGAPALACGNTMVFKPSETTPLSALKVAEILIEAGAPKGIYNVVQGYGDVGASLVTDPRVAKVSLTGSVPTGRRVYAAAAESIKHVTMELGGKSPLVVFDDADIENAVSGAILGNFYSSGQVCSNGTRVFVQKGIKEAFLSRLAERLATAVIGDPMDPATNFGPMVSEAQMNIVLGYVDKGKAEGARLVYGGTRLDRDGFYLLPTVFADVTDDMTIAREEIFGPVMSVLDFDTEEEVLERANATEFGLAAGVFTRDITRAHRMVAGFEAGTCYINSYNLAPVEAPFGGSKQSGVGRENSKLAINHFSEMKTVFVSMNDIQAPY

SEQ ID NO: 263 - DNA, 1497 bp, Bacillus clausii KSM-K16
  CDS (1)..(1497): transl_table=11
atgtcacaagtgccaacaggcgaaaacagcttaaagactaggttagtgtcgtttttaaacggcggatcaaagaaactattgatcaatggagaatgggttgatgccgtatctggccaaacgtttgagacgatgaatccagcaactggtgacacgttggccattgtggcagaagcaggacaagaggatatcgattctgcggtcaaagctgcacggaaggcgtttgatgaagggccttggtcaaaaatgagcgcggcagaaagaagtcgtcttatctacaaactagctgatttaatagaggagcataaagaagagctcgctcagctagagactttagataatggcaagccgattcgcgagacggccaatgcggatgttccattagcgattgaacattttcgttattttgccggatgggcaacaaaaatagtaggacaaacgatcccagtgcaagggaattatttcaattatacgcgccatgaagcaattggtgtcgttggtcaaatcattccttggaatttcccattattgatggccgcgtggaaacttggtgccgcccttgctacaggttgtacggttgtattaaaaccagccgagcagaccccgctgtctgccttgtatttaggggaattgatcaatgaagcgggatttccaaaaggggttgtcaacattgttcctggatttggacattcggcaggaacagcaattgtcaatcacccagctgtcgataaagtcgcttttacaggctctacaaatgttggaaaattaattatgaaacaagcgagtgaatctttgaagagggtgacactggaactcggtggcaagtctccaaatatcattttacctgatgctgatctttcgaaggccgttcctggatcacttatgggaattatgttcaaccaaggccaggtgtgctgcgcagggagtcgattgtatgtccaaaagaaacaatacgatcatgtcgttgctgacctagtgtcgttaacaaagaaaattaatcaaggggatgggctgttagaacacacgacaatggggcctttgatttcgactcagcaacaaaagcgcgtgaaaaattatatcgatcgtggcgttgaggagggggcagagctattagccggcgggaccattccatatgaccaagggtattttgtctccccaactatttttgctgacgtagatcattccatgacgattgcaaaggaggaaatttttggaccggttgtggccgcgatgccgtttgaaagcgtcgatgacctaattggtaaagccaacgattcggattatgggctagctgctggtgtttggacacaagacattaaaaaagcccactacattgcccaccgaatcaaagcggggaccatttgggtgaattgctataatgtatttgatgcagccagcccgtttggcggttacaaacaatcggggattggccgagaaatgggaagctatgcattagacaattatacggaagtaaaaagtgtctgggtcaatatggattaa

SEQ ID NO: 264 - protein, 498 aa, Bacillus clausii KSM-K16
MSQVPTGENSLKTRLVSFLNGGSKKLLINGEWVDAVSGQTFETMNPATGDTLAIVAEAGQEDIDSAVKAARKAFDEGPWSKMSAAERSRLIYKLADLIEEHKEELAQLETLDNGKPIRETANADVPLAIEHFRYFAGWATKIVGQTIPVQGNYFNYTRHEAIGVVGQIIPWNFPLLMAAWKLGAALATGCTVVLKPAEQTPLSALYLGELINEAGFPKGVVNIVPGFGHSAGTAIVNHPAVDKVAFTGSTNVGKLIMKQASESLKRVTLELGGKSPNIILPDADLSKAVPGSLMGIMFNQGQVCCAGSRLYVQKKQYDHVVADLVSLTKKINQGDGLLEHTTMGPLISTQQQKRVKNYIDRGVEEGAELLAGGTIPYDQGYFVSPTIFADVDHSMTIAKEEIFGPVVAAMPFESVDDLIGKANDSDYGLAAGVWTQDIKKAHYIAHRIKAGTIWVNCYNVFDAASPFGGYKQSGIGREMGSYALDNYTEVKSVWVNMD

SEQ ID NO: 265 - DNA, 1503 bp, Psychrobacter arcticus 273-4
  CDS (1)..(1503): transl_table=11
atgactgactcaactgatcttaaacacatggacaatgccgaacaaacacagacggcttatatcaatggcagttatcttgcagtagacaaagcgctctcgaccttcgatagcattaaccctgtaacgggtgaggtgctctcaaccattcagcaaaccactaccgagcaaatcaatgatgctgttattgcagcgcaaaaaggtcaaaaggtttgggcggcaatgactgcgattgagcgtagccgtatcctgttaaatgccgttgctatattacgcgaacgcaatgacgagctggccgttcttgaaactaaggacacgggaaaagcgatctctgaaactaaatatgtcgatatcgtcaccggtgccgatgtcattgagtactatgcagggcttgcgcccatgatcgaggggcgtcaaatcccgctacgtgataccagttttgtgtacacccgccaagagccgttaggcgtaatcgcgggtattggtgcatggaactatcccatccaaatcgccatgtggaaagcagcacctgcgctcgcggcgggtaatgcgatgatctttaagccttctgaagtgacgccattgtctgcgctaaaactggcagaaatcttcactgaagcgggattgccagaaggtgtctttaatgtagtgcagggtaactatgaagttggcgaagcgcttactcagcaccctgacatcgctaaagtgtcattcacgggtggcgtgccaacgggtaaaaaagtcatgtcatcagcggcaacgtcctcactcaaagacgttactttagagctgggcggtaaatcaccgctgattatatttgacgatgccgatattgataccgctgccgacatcgccatgatggcgaacttctatagtacgggacaagtatgtaccaatggtacgcgagtatttatccctaaagcgttacaagccaaatttgagcaagccatccaaacgcgcgttaagcgcatcaagttgggtgatcctatggatgacagtatcaccatggggccattggtaagcttcccgcatatggacagagtgcttggttatatcgagcaaggtaaagcgagcggcgcgcgcttactgtgtggcggtgcacgtgtgacaacaggctcgcttgctgacggtgcttatgtggcggctaccgtatttactgattgcacggatgatatgagtattgtgcgcgaagagatctttggtccagttatgtcaatattgacttacgagacagaagaagaagtcattcgccgtgccaacgataccgagtatggtttggcggcaggcgttgtgactgctgatttgaaccgcgcgcatcgcgtaatcgctcaaattgaagcgggtatctgctggttaaatacgtggggtgagtcggctgcgcaaatgccagtaggcggctacaagcactcaggcattggccgtgaaaacggcattcaaacgcttgagcattacactcaaaccaagtctattcaagtagagctgggcgcatttgaatctgtattttaa

SEQ ID NO: 266 - protein, 500 aa, Psychrobacter arcticus 273-4
MTDSTDLKHMDNAEQTQTAYINGSYLAVDKALSTFDSINPVTGEVLSTIQQTTTEQINDAVIAAQKGQKVWAAMTAIERSRILLNAVAILRERNDELAVLETKDTGKAISETKYVDIVTGADVIEYYAGLAPMIEGRQIPLRDTSFVYTRQEPLGVIAGIGAWNYPIQIAMWKAAPALAAGNAMIFKPSEVTPLSALKLAEIFTEAGLPEGVFNVVQGNYEVGEALTQHPDIAKVSFTGGVPTGKKVMSSAATSSLKDVTLELGGKSPLIIFDDADIDTAADIAMMANFYSTGQVCTNGTRVFIPKALQAKFEQAIQTRVKRIKLGDPMDDSITMGPLVSFPHMDRVLGYIEQGKASGARLLCGGARVTTGSLADGAYVAATVFTDCTDDMSIVREEIFGPVMSILTYETEEEVIRRANDTEYGLAAGVVTADLNRAHRVIAQIEAGICWLNTWGESAAQMPVGGYKHSGIGRENGIQTLEHYTQTKSIQVELGAFESVF

SEQ ID NO: 267 - DNA, 1464 bp, Colwellia psychrerythraea 34H
  CDS (1)..(1464): transl_table=11
ttgtcgttagtacgttatagaaattttgtcgatggtgcctacatggcaaacgacagtggtgaaacattcgatgtgattaacccagctacgggaaaagtaatttatcaagttgaagtcgccgatggaaaaattaaacaagaagcaataactagtgctcagagtggttttgctacttggtcagcaatgagcgctatacagcgcagtcgaattctactcaaagcggtagctttgttacgcgagcgtaatgatgaactggcagagattgaagtacttgataccggtaaaccatggcaagaagcttcagttgttgatgttgagtcaggtgctgattctatcgagttttttgcgggcttggctcctggaattgaaggtaatcagcagcaagtcgatggtgatttttattacactcgtcgtgaagcattaggtatttgcgccggtattggtgcgtggaattacccattacagatagcttgttggaaagccgcacctgcattggcgtgtggtaactcgatgatttttaaaccatcagaagaaacaccattaggcgcattaaaactcgctgagattttcactgaagcaggcattccagatggcgtatttaatgttgttcaaggtgctggtgaagtgggttcttggttaagtcatcacccagatatcgctaaagtttcttttactggtgaagttggtactggcaagaaagtcatggcaggtgctgccacgacgcttaaagatgtcactatggaacttggtggaaaatcaccattgattatttttgatgatgcagatatcgacaatgctgtttctgctgccatgttaggtaatttttatacgcaaggtgaagtttgcaccaatggtacgcgcgtattcgtacaagaatcagcatacccgaaatttattgagaaattactgcaacgtactcgccaaaacattatcgttggagatccaatggatcccgagacaaattttggtgctctcatctcgaaaaagcattttgatttggtatcagattatatcaaagtcggtattaaagaaggcgctacgctacttcatggcggcacatcactgcagccagacaatgcacccaatggctattttattgcgccaactatttttaccgattgtactgatggcatgacaatttgccgagaagagatttttgggccagtaatgtcagtattaatatttattgatgaagatgaagtggttgctagagccaatgctactgattatgggctggcagcggcggtattcacacaagatattaattgtgctcaccgtgttatccataaaatggaagctggaatttgctggataaacagctttggtgcatcacctgcgcaaatgcctgtaggtggttataaacagtcaggtataggacgtgaaaatggtctggttacactaaaccattacactcaaattaaatccgtttatgttggtcttcagccacttgatagtcctttttaa

SEQ ID NO: 268 - protein, 487 aa, Colwellia psychrerythraea 34H
MSLVRYRNFVDGAYMANDSGETFDVINPATGKVIYQVEVADGKIKQEAITSAQSGFATWSAMSAIQRSRILLKAVALLRERNDELAEIEVLDTGKPWQEASVVDVESGADSIEFFAGLAPGIEGNQQQVDGDFYYTRREALGICAGIGAWNYPLQIACWKAAPALACGNSMIFKPSEETPLGALKLAEIFTEAGIPDGVFNVVQGAGEVGSWLSHHPDIAKVSFTGEVGTGKKVMAGAATTLKDVTMELGGKSPLIIFDDADIDNAVSAAMLGNFYTQGEVCTNGTRVFVQESAYPKFIEKLLQRTRQNIIVGDPMDPETNFGALISKKHFDLVSDYIKVGIKEGATLLHGGTSLQPDNAPNGYFIAPTIFTDCTDGMTICREEIFGPVMSVLIFIDEDEVVARANATDYGLAAAVFTQDINCAHRVIHKMEAGICWINSFGASPAQMPVGGYKQSGIGRENGLVTLNHYTQIKSVYVGLQPLDSPF

SEQ ID NO: 269 - DNA, 1464 bp, Colwellia psychrerythraea 34H
  CDS (1)..(1464): transl_table=11
atgcctctaattaaatataaaaactatgttgatggtgcatatacaagcaatggcacaggggaaacgtttgatgttacgaacccggcaacgggtcaggtcatttatcaggtagaaattgctgatgaactgataaaaagtaaagctatcgaaagcgctaagcgaggatttgcccagtggtctgcgatgagcgcgaccgagcgcagccgagtattattaaaagcggtcgacttactgcgtgaacgaaatgatgaattggcagaaatcgaagttttggatacgggtaaaccatggcaagaggctagcgtggttgatgtgcagtcgggcgccgattctattgaattttttgccggtctggcaccaggcattgaaggtaatcagcaacaagtaggggctgatttttactacacacgccgcgaagctttaggtatttgtgccggtattggcgcatggaattacccattacaaattgcttgttggaaggctgctcctgctcttgcttgtggtaatgcaatgatattcaaaccctctgaagaaacaccgttaggtgctctcaaattggcggaaatctttagtgaagccggtttgcctgatggggtatttaacgtgctgcaaggagcaggggatgtcggttcgtggttaagccatcacccagagattgctaaagtttcttttactggtgaagtgggtacgggtaagaaggtcatggcaggtgctgccaccacgttaaaagatgtcaccatggaactgggtggaaaatcaccgcttatcatctttgatgacgctgatgttgataacgcggtatcggcggcgatgttaggtaatttttatacccaaggcgaaatttgcactaatggcacacgtgtttttgtgcagaaagaaatttatccaacctttattaaaaaactagtagagcgcactaaaaacaacattattgttggcgaccccatggatcctgagactaactttggtgcgctgatctcagccaagcatcaacgcttagtactcgattatatcgacctaggcctaaaagaaggtgcgaccttgttgcaaggtggcgctgcgctaaacccaataggttgtgatgctggctattttgtcgaacccaccatatttactgattgtaatgatgatatgcgtatttgctgtgaagaaatatttggtccagtaatgtcggtgttgaccttcgacgatgaagacgaggttatcaagcgtgctaatgcaactgaatttggccttgctgctggcgtattcacccaagacatcactcgtgctcatcgggttatacatcaaatgcaagcaggcatttgttggattaatagctacggactttcaccagcagaaatgcctgtgggcggatataaactctcgggtattggccgagaaaatggtctagcgacattaaaccactacacccaaattaaagcggtatacgttggtttagaaccactcgaaagtcctttttaa

SEQ ID NO: 270 - protein, 487 aa, Colwellia psychrerythraea 34H
MPLIKYKNYVDGAYTSNGTGETFDVTNPATGQVIYQVEIADELIKSKAIESAKRGFAQWSAMSATERSRVLLKAVDLLRERNDELAEIEVLDTGKPWQEASVVDVQSGADSIEFFAGLAPGIEGNQQQVGADFYYTRREALGICAGIGAWNYPLQIACWKAAPALACGNAMIFKPSEETPLGALKLAEIFSEAGLPDGVFNVLQGAGDVGSWLSHHPEIAKVSFTGEVGTGKKVMAGAATTLKDVTMELGGKSPLIIFDDADVDNAVSAAMLGNFYTQGEICTNGTRVFVQKEIYPTFIKKLVERTKNNIIVGDPMDPETNFGALISAKHQRLVLDYIDLGLKEGATLLQGGAALNPIGCDAGYFVEPTIFTDCNDDMRICCEEIFGPVMSVLTFDDEDEVIKRANATEFGLAAGVFTQDITRAHRVIHQMQAGICWINSYGLSPAEMPVGGYKLSGIGRENGLATLNHYTQIKAVYVGLEPLESPF

SEQ ID NO: 271 - DNA, 1473 bp, Pseudomonas fluorescens PfO-1
  CDS (1)..(1473): transl_table=11
atggcccgtttcgaactgcaaaaactctacatcgatggcgcgtactccgacgccggcagcgatgccaccttcgaagccatcaacccggctaacggtgaagtcctcgcacacgtgcaacgtgcgaccaaggaagacgtcgagcgtgctgtggtcagcgccgaaaagggccagaaaatctgggccgcgatgaccgccatggagcgttcgcgcatcctgcgtcgcgccgtcgacatcctgcgcgagcgcaacgatgaactggctgccctggaaaccctggacaccggtaaagccttctccgaaaccaagtacgtcgacatcgtcaccggcgccgacgtgctggaatactacgcaggcctggtacccgccatcgaaggcgagcagatcccgctgcgtgacacttccttcgtttacacccgtcgcgagccgctgggcgttgtcgctggtatcggcgcgtggaactacccgatccagatcgccctgtggaaatccgcgccagccttggcggccggtaacgcgatgatcttcaagccaagcgaagtcacatcgctgaccaccctgaaactggctgagatctacaccgaagccggcgttccgaacggcgtgttcaacgtactgaccggcagcggccgtgaagtcggcacctggctgaccgagcacccgcgcatcgagaagatctctttcaccggcggcaccgacaccggcaagaaggtcatggccagcgcttcggcttcgtcgctcaaagacgtgaccatggaactgggcggcaagtccccgctgatcatctgcgacgacgccgatcttgatcgcgccgccgacaccgccatgatggccaacttctacagctccggtcaggtctgcaccaacggcactcgcgtgttcgtgccgagccacctgaaagccgctttcgaagccaagatcgtcgagcgcgttgcgcgcatccgcgttggcaacccggaagacgaaaacaccaacttcggcccgctggtcagcttcccgcacatggaaagcgtgctgggctacatcgccaagggtaaagaagaaggcgcccgcgttctgtgcggtggcgagcgtctgaccgacggcgaattcgccaaaggcgcgttcgtggctccaaccgtgttcaccgactgcaccgacgacatgactatcgtccgtgaagaaatcttcggcccggtgatggcgatcctgagctacgaaaccgaagaagaagtgatccgtcgcgccaacgacaccgacttcggcctggccgccggcatcgtcacccgcgacctgaaccgcgcgcaccgcgtgattcatcaactggaagccggtatctgctggatcaacgcctggggcgagtccgacgcaaaaatgccggttggcggctacaagcagtcgggcgtcggccgtgagaacggcatcagctcgctgaacaacttcactcgcatcaaatcggtgcaggtcgagctgggcgattacgtctcggtgttctaa

SEQ ID NO: 272 - protein, 490 aa, Pseudomonas fluorescens PfO-1
MARFELQKLYIDGAYSDAGSDATFEAINPANGEVLAHVQRATKEDVERAVVSAEKGQKIWAAMTAMERSRILRRAVDILRERNDELAALETLDTGKAFSETKYVDIVTGADVLEYYAGLVPAIEGEQIPLRDTSFVYTRREPLGVVAGIGAWNYPIQIALWKSAPALAAGNAMIFKPSEVTSLTTLKLAEIYTEAGVPNGVFNVLTGSGREVGTWLTEHPRIEKISFTGGTDTGKKVMASASASSLKDVTMELGGKSPLIICDDADLDRAADTAMMANFYSSGQVCTNGTRVFVPSHLKAAFEAKIVERVARIRVGNPEDENTNFGPLVSFPHMESVLGYIAKGKEEGARVLCGGERLTDGEFAKGAFVAPTVFTDCTDDMTIVREEIFGPVMAILSYETEEEVIRRANDTDFGLAAGIVTRDLNRAHRVIHQLEAGICWINAWGESDAKMPVGGYKQSGVGRENGISSLNNFTRIKSVQVELGDYVSVF

SEQ ID NO: 273 - DNA, 1452 bp, Rhodobacter sphaeroides 2.4.1
  CDS (1)..(1452): transl_table=11
gtgagagcccagcccgccgccagccatttcgtcgacggtcgtccgctcgaggatgagaccggcgcgccgatccccgtgatctatcccgccaccggcgaggagatcgcccgccttcacgaggccacgcccgccgtgatcgaggcggctttggcctcgggcgcccgcgcgcaggcggcctgggccgcgatgcggcccgtcgagcgggcgcggatcctgcgccgggcctcggacctgatccgggcgcacaacgaggagctgagccttctcgagacgctcgacaccggcaagccgctgcaggagacgctggtggccgactgggcctcgggggcggatgcgctggaattcttcgccggtctggcgcccgtcgtcaccggcgagaccgtgccgctggggcaggatttcgtctatacgatccgcgagccgctgggcctctgcgtgggcatcggcgcctggaactacccgagccagatcgcctgctggaaggccgcgcccgcgctcgcgctcggcaatgcgatggtgttcaaaccctcggaagtgacgccgctcggcgcgctgaagctggccgagatcctgatcgaggcgggcctgccgcccgggctcttcaacgtggtgcagggccgcggcgcggtgggggcgtcgctcgtcaccgacagccgggtggccaaggtctcgctcacgggctcggtgccgacggggcggcgcgtctatgcggctgcggccgagggcgtgcgccatgtcacgatggagctcggcggcaagtcgcccctgatcgtcttcgacgatgccgatctggagagcgccatcggcgcggcgatgctcggcaacttctattccgcgggccagatctgctcgaacgggacgcgggtcttcgtgcagaaggggatcaaggaagcgttcctcgcccggctggccgagcgggccgatgccatccgcatgggcgatccgctcgaccccgaggtccagatggggccgctcgtctcgcaggcgcagctcgagaaggtgctggcctatatcgagaaggcccgcgccgagggcggccgcctcgtctgcggcggcgaggcctcggtcagccccggctgctatgtccagcccacggtcttcgccgatgtgacggacgccatgaccctcgcccgcgaggaggtgttcggtccggtgatggcggtgctcgatttcgagaccgaggaggaggcgatcgcgcgggcgaatgccaccgacttcggcctcgccgcgggggtcttcaccgcggatctcacgcgggcgcaccgggtggtggcgcagctgcaggccgggacctgctggatcaacgcctacaaccttacgccggtcgaggcgcccttcggcggggtgaagctgtcgggcgtgggccgcgagaacggccgggccgccgtccagcactatacgcaggtgaagtcggtctatgtcggcatggggccggtggacgccccctactga

SEQ ID NO: 274 - protein, 483 aa, Rhodobacter sphaeroides 2.4.1
MRAQPAASHFVDGRPLEDETGAPIPVIYPATGEEIARLHEATPAVIEAALASGARAQAAWAAMRPVERARILRRASDLIRAHNEELSLLETLDTGKPLQETLVADWASGADALEFFAGLAPVVTGETVPLGQDFVYTIREPLGLCVGIGAWNYPSQIACWKAAPALALGNAMVFKPSEVTPLGALKLAEILIEAGLPPGLFNVVQGRGAVGASLVTDSRVAKVSLTGSVPTGRRVYAAAAEGVRHVTMELGGKSPLIVFDDADLESAIGAAMLGNFYSAGQICSNGTRVFVQKGIKEAFLARLAERADAIRMGDPLDPEVQMGPLVSQAQLEKVLAYIEKARAEGGRLVCGGEASVSPGCYVQPTVFADVTDAMTLAREEVFGPVMAVLDFETEEEAIARANATDFGLAAGVFTADLTRAHRVVAQLQAGTCWINAYNLTPVEAPFGGVKLSGVGRENGRAAVQHYTQVKSVYVGMGPVDAPY

SEQ ID NO: 275 - DNA, 1485 bp, Burkholderia sp. 383
  CDS (1)..(1485): transl_table=11
atgaagtcagaatccgaacatcccggcctggccgcggcgcttgcgtggtgccgctccggcgccaagcagcacttcatcgacggcaagtgggtgccggccgcgtccggcaggacgatggagacgttgaacccggcgacggcggacgtgctcgcacacatcgccgaaggcgacaaggcggacgtcgaccttgcggtggccgccgcgcggcgtgcgttcgaatcgtcgggctggcgcggcatgtctccgcatgcgcgcaccgccgtgctgctgcgccttgcagacgcgatcgagcaacacgctgatgaactggccgcactcgagacgctcgacaacgggatgccggcctggttcagcgcggcggtggtgaagatgaccgtcgacacgttccgttactacgcaggctggccgacgaagattctcggcacgaccgtgccgaccgacccgtcggccttcatctacacgctgcgcgagccgatcggcgtctgcggccagatcaacccgtggaacgtgccgctgctgctggccggcgtcaagttcgggccggcgctcgcgtgcggcaacacgatcgtcgcgaagccttcggaactcgcgtcgttgacctgtctgcggcttgtcgagatttttcacgaagccggtctgccgccgggcgtgatgaacgtggtaaccggctatgggcagacggtcggcgcggcgatctccgagcatccgggtatcgacaaggtcgcgtttaccggctcgaccgcaatcggcaagcagatcctgctcgcgtcggccggcaacctgaagcgcgtgacgctcgagctcggcgggaaaagcccgcatatcgtgtttccggatgccgatctcgacaaggcgctggccgccgcggtcaacggcttcacgcgcaattccgggcagatctgctcgtccggcacgcgcctgttcgttcatcgcagcattcacgatgaattcgcgaacgaagtggcgaagctcgccgcgcgactgaaagtcggcaacccgttcgacgccgatacgaaactcggcccgctgatttcgtcgaagcagcgcgatcgcgtgatgtcgtacgtggccgcaggcaacgacgaaggcgcgacgttgctgaccggcggccggcaagcgtgcgatgccggttactacgtcgagccgacggtgttctccggtgtaagcaacgcaatgaggatcgcgcaggaggagatcttcggcccggtcgtctgcgtgattccgttcgataccgaagaggacgtgatcgcgcagggcaacgattcgacttacgggcttgccggcggcatctggacgcgtgacatcggccgggcgcaccggatcgcggcggcgttgaagggtggccggatctggatcaacacgttcggcgaaaccgatccggtgatgccgttcggtggctacaagcagtcggggctgggccgcgagttcggcgcggagtcgatccagacctacacggaagcgaagtcggtgatgctccggtattga

SEQ ID NO: 276 - protein, 494 aa, Burkholderia sp. 383
MKSESEHPGLAAALAWCRSGAKQHFIDGKWVPAASGRTMETLNPATADVLAHIAEGDKADVDLAVAAARRAFESSGWRGMSPHARTAVLLRLADAIEQHADELAALETLDNGMPAWFSAAVVKMTVDTFRYYAGWPTKILGTTVPTDPSAFIYTLREPIGVCGQINPWNVPLLLAGVKFGPALACGNTIVAKPSELASLTCLRLVEIFHEAGLPPGVMNVVTGYGQTVGAAISEHPGIDKVAFTGSTAIGKQILLASAGNLKRVTLELGGKSPHIVFPDADLDKALAAAVNGFTRNSGQICSSGTRLFVHRSIHDEFANEVAKLAARLKVGNPFDADTKLGPLISSKQRDRVMSYVAAGNDEGATLLTGGRQACDAGYYVEPTVFSGVSNAMRIAQEEIFGPVVCVIPFDTEEDVIAQGNDSTYGLAGGIWTRDIGRAHRIAAALKGGRIWINTFGETDPVMPFGGYKQSGLGREFGAESIQTYTEAKSVMLRY

SEQ ID NO: 277 - DNA, 1470 bp, Burkholderia sp. 383
  CDS (1)..(1470): transl_table=11
atgtccgtattcggtttgcagcgcctctacatcggcggcggttacgtcgacgccacgagcggcaagactttcgacaccttcgatcccgccaccggcgaactgctcgcgcaggtgcagcaggccagcgcagccgacgtcgaccgcgcggtcgcgtccgcccaggaaggccagcgcgaatgggccgcgatgaccgcgatgcagcgctcgcgcatcctgcgccgcgccgtcgacctgctgcgcgagcgcaacgacgagctcgccgcactggaaacgcgcgacacgggcaagccgatcggcgagacgctcgcggtcgacatcgtcaccggcgcggacgtgatcgagtactacgcgggcctcgcgaccgcgatcgaagggctgcaggtgccgctgcgcgccgagtcgttcgtctacacgcgccgcgagccgctcggcgtgtgcgcgggcatcggcgcgtggaactacccgatccagatcgcgtgctggaagacggcccccgcactcgcggccggcaacgcgatggtgttcaagccgagcgaagtcacgccgctcaccgcgctgaagctcgcggaaatctatacggaagccggcgtgccggccggcgtgttcaacgtcgtgcagggcgacggctcggtcggcgcgctgctgacgggccaccctgacatcgcgaaggtgtcgttcaccggcggcgtcgaaaccggcaagaaggtgatgtcgctggccggcgcgtcgtcgctgaaggaagtgacgatggaactcggcggcaagtcgccgctgatcgtgttcgacgacgcggatctcgaccgtgcggccgacatcgcggtgaccgccaacttcttcagctcgggccaggtctgcacgaacggcacgcgcgtgttcgtgcaccgctcgatcaaggacgcattcacgcagcgagtactcgaacgcgtgaagcgcatccgcgtcggcaagccgaccgatgccgataccaacttcggcccgctcgtgtcggccgcgcagctcgacaaggtgctcggcttcatcgaaagcggcaaggcggaaggcgcgaagctgctcgcgggcggcacgcgcctcaccgacggccacttcggtagcggccagtacgtcgcgccgaccgtgttcggcgattgccgcgacgacatgaagatcgtccgcgaggaaatcttcgggccggtgatgagcatcctcgatttcgaatcggaggacgaagtgattgcccgcgcgaacgacacgcactacggcctggcggccggcgtcgtgaccgagaacctgtcgcgcgcgcaccgcacgatccatcgcctcgaagccggcatctgctggatcaacacgtggggcgaatcgccggccgagatgccggttggcggatacaagcaatccggtgtcggacgcgagaacggcatcacgacgctcgagcactacactcgaatcaagtcggtgcaggtcgagctcggccgctacaacccggtgttttga

SEQ ID NO: 278 - protein, 489 aa, Burkholderia sp. 383
MSVFGLQRLYIGGGYVDATSGKTFDTFDPATGELLAQVQQASAADVDRAVASAQEGQREWAAMTAMQRSRILRRAVDLLRERNDELAALETRDTGKPIGETLAVDIVTGADVIEYYAGLATAIEGLQVPLRAESFVYTRREPLGVCAGIGAWNYPIQIACWKTAPALAAGNAMVFKPSEVTPLTALKLAEIYTEAGVPAGVFNVVQGDGSVGALLTGHPDIAKVSFTGGVETGKKVMSLAGASSLKEVTMELGGKSPLIVFDDADLDRAADIAVTANFFSSGQVCTNGTRVFVHRSIKDAFTQRVLERVKRIRVGKPTDADTNFGPLVSAAQLDKVLGFIESGKAEGAKLLAGGTRLTDGHFGSGQYVAPTVFGDCRDDMKIVREEIFGPVMSILDFESEDEVIARANDTHYGLAAGVVTENLSRAHRTIHRLEAGICWINTWGESPAEMPVGGYKQSGVGRENGITTLEHYTRIKSVQVELGRYNPVF

SEQ ID NO: 279 - DNA, 1479 bp, Burkholderia thailandensis E264
  CDS (1)..(1479): transl_table=11
atgtccgctatgtccgtatacggtctgcaacgcctttacatcgccggcgcctatgccgacgccacgagcggcaagacgttcgacacgttcgatcccgcgacgggcgagctgctcgcgagcgtccagcaagcgagcgccgacgacgtcgaacgcgcggtcgcatccgcgcgcgaaggccagcgcgaatgggccgcgatgacctcgatgcagcgctcgcgcatcctgcgccgcgcggtcgaattgctgcgcgagcgcaatgacgcgctcgccgagctcgaaatgcgcgacaccggcaagccgatcgcggaaacgcgcgccgtcgacatcgtcacgggcgccgacgtgatcgagtactacgcgggcctcgcgaccgcgatcgagggcctgcaagtgccgctgcgccccgaatcgttcgtctacacgcggcgcgagccgctcggcgtgtgcgcgggcatcggcgcatggaactacccgatccagatcgcctgctggaaaagcgcgcccgcgctcgccgccggcaacgccatgatcttcaagccgagcgaagtcacgccgctgtccgcgctcaagctcgcggagatctacaccgaggcgggcgtgcccgccggcgtgttcaacgtcgtgcagggcgacggctcggtcggcgcgctgctgaccgcgcacccggggatcgcgaaggtatcgttcacgggcggcgtcgaaaccggcaagaaggtgatgtcgctcgccggcgcgtcgtcgctcaaggaagtgacgatggagctgggcggcaagtcgccgctcatcgtgttcgacgacgccgacctcgatcgcgcggccgacatcgccgtcactgcgaacttcttcagcgcgggccaggtgtgcacgaacggcacgcgcgtgttcgtccagcaggcggtaaaggacgctttcgtcgagcgcgtgctcgagcgcgtcgcgcgaatccgcgtcggcaaaccttcggaccccgacacgaatttcggcccgctcgcgagcgccgcgcagctcgacaaggtgctcggctacatcgagagcggcaaggctgagggcgcgaagctgctcgcgggcggcgcgcgcctcgtgaacgatcacttcgcgagcgggcagtacgtcgcgccgaccgtgttcggcgattgccgcgacgacatgaagatcgtccgtgaagagatcttcggcccggtgatgagcatcctgtcgttcgaaacggaagacgaagcgatcgcgcgcgcgaacgcgaccgagtacggcctcgcggcgggcgtcgtcaccgagaacctgtcgcgcgcgcaccgcgcgatccatcgcctcgaagccggcatctgctggatcaacacgtggggcgagtcgcccgccgagatgccggttggcggctacaagcaatccggcgtcggacgcgagaacggcatcacgacgctcgagcactacactcgaatcaaatcggttcaggtcgagctcggccgctatcaaccggtgttctaa

SEQ ID NO: 280 - protein, 492 aa, Burkholderia thailandensis E264
MSAMSVYGLQRLYIAGAYADATSGKTFDTFDPATGELLASVQQASADDVERAVASAREGQREWAAMTSMQRSRILRRAVELLRERNDALAELEMRDTGKPIAETRAVDIVTGADVIEYYAGLATAIEGLQVPLRPESFVYTRREPLGVCAGIGAWNYPIQIACWKSAPALAAGNAMIFKPSEVTPLSALKLAEIYTEAGVPAGVFNVVQGDGSVGALLTAHPGIAKVSFTGGVETGKKVMSLAGASSLKEVTMELGGKSPLIVFDDADLDRAADIAVTANFFSAGQVCTNGTRVFVQQAVKDAFVERVLERVARIRVGKPSDPDTNFGPLASAAQLDKVLGYIESGKAEGAKLLAGGARLVNDHFASGQYVAPTVFGDCRDDMKIVREEIFGPVMSILSFETEDEAIARANATEYGLAAGVVTENLSRAHRAIHRLEAGICWINTWGESPAEMPVGGYKQSGVGRENGITTLEHYTRIKSVQVELGRYQPVF

SEQ ID NO: 281 - DNA, 1506 bp, Burkholderia thailandensis E264
  CDS (1)..(1506): transl_table=11
atgaatctggccgctctctcgacccagcatcaacgccaatccggctttctcgcccgccgccagttcggcaactggatcgacggcgccgccgccgagccgcgctcgggccgctatctgcccgtcgtcgatcccgcgaccgagatgacgatcgccgaagtcgccgcgagcgacgcgcgcgacgtcgatgcggccgtcgccgccgcgcgccgcgccttcgattcgggcgactggccgcgaatgcggcccgcgagccgcgagaagctgctgcatcagctcgccgaccggatcgagcgctacgcggacgagctcgccgcgctcgaaacgctcgaaaccggcaagctcgtcgggctcgcgcgcgcgatcgacgtgctgggcggcgccgaatacgtgcgctacatggccggctgggcgacgaagctcgaaggctcgacactcgacacgtcgatcgccgtgcccgccggcacggagtatttcgcgtacacgcgccgcgaggcggtgggcgtcgtcggcgcgatcgtgccgtggaattttccgctcgcgatcgcgttgtggaaggtcgccaccgcgctcgcgtgcggctgcacggtcgtgctgaagccgtcggaggaaacgccgctcaccgcattgcgcctcggcgaactcgcgcaggaagcagggctgcccgacggcgtgctgaacgtggtgacgggcacgggcgcggataccggcgcggcgctcgtcgcgcatccgggcgtcgacaagatcacgttcacgggctcggtcggcgtgggcaaggccattggacatgcggccgtcgaccggatggcgcgcttcacgctcgagctcggcggcaaatcgccgctgatcgtcttcgacgacgccgatcccgacgtcgccgcgcgcggcgcggcgcaaggcatcttcttcaatcaggggcaggtttgcacggcaggctcgcgcgtgtacgtgcacaagagcctgttcgagcgggtcgtcgccggcatcgcggcggccgccgaatcgatgaagatcggctcgggtttcgatccgaacacgcagatcggcccgctcgtgtcgaagcggcacttcgagcgcgtgctcggccacatcgacgccgcgaaggaagagggcgcgacgctcgtcacgggcggcacgcgcgcgctcgacggcggctatttcgtgaagccgacggtattcgtcgacgccgccccctcgatgcggatcgtgcgcgaagaggtgttcggcccggtcgtcacggtcacgccgttcgacacggtggacgacgcggtgcggctcgcgaacgacagcgacttcgggctcgcggcgagcgtgtggtcgcagaacctgtcgcgcgtgcatcgcgtcgtgccgcggctgaaggcgggcatcgtctgggtcaacacgcacaacatgctcgacaacaatctgccgtttggcggcgtcaagcaatcgggctacggccgcgagctcggccgcgcggcgctcgaacagttcaccgagctcaagtccgtctgcatcgcgcattga

SEQ ID NO: 282 - protein, 501 aa, Burkholderia thailandensis E264
MNLAALSTQHQRQSGFLARRQFGNWIDGAAAEPRSGRYLPVVDPATEMTIAEVAASDARDVDAAVAAARRAFDSGDWPRMRPASREKLLHQLADRIERYADELAALETLETGKLVGLARAIDVLGGAEYVRYMAGWATKLEGSTLDTSIAVPAGTEYFAYTRREAVGVVGAIVPWNFPLAIALWKVATALACGCTVVLKPSEETPLTALRLGELAQEAGLPDGVLNVVTGTGADTGAALVAHPGVDKITFTGSVGVGKAIGHAAVDRMARFTLELGGKSPLIVFDDADPDVAARGAAQGIFFNQGQVCTAGSRVYVHKSLFERVVAGIAAAAESMKIGSGFDPNTQIGPLVSKRHFERVLGHIDAAKEEGATLVTGGTRALDGGYFVKPTVFVDAAPSMRIVREEVFGPVVTVTPFDTVDDAVRLANDSDFGLAASVWSQNLSRVHRVVPRLKAGIVWVNTHNMLDNNLPFGGVKQSGYGRELGRAALEQFTELKSVCIAH

SEQ ID NO: 283 - DNA, 1470 bp, Burkholderia xenovorans LB400
  CDS (1)..(1470): transl_table=11
atggcggtattcgcaatacaacgcctctacatcggcggcgcgtatgtcgacgcaaccagcggcgaaaccttcgatacgctcgaccccgccaccggcgagacgctcgcgagcgtgcagcaggcttcggcggcggacgtcgagcgcgcggtgcaatccgcgcgggaaggccaacgcgaatgggccgcgctcacggccatgcagcgttcgcgcgttctgcgccgcgccgtcgagattctgcgcgagcgcaacgacgaactcgccgcgctcgaaacgcgcgacaccggcaagccgattgcggaaacgctcgcggtggatatcgccaccggcgcggacgtgatcgagtactacgcgggactcgccactgccattgaagggcaacagattcccttgcggcccacctcgttcgtttatacgcggcgcgagccgcttggcgtttgcgcgggcatcggcgcatggaactatccgatccagatcgcgtgctggaagtcggcgcccgcgctcgcggccggcaacgcgatgatcttcaagccgagtgaaatcacgccgctatcggcgttgaagctcgccgagatctataccgaagccggcgtgcccgcgggcgtgttcaatgtcgtgcaaggcgacggacgcgtcggtgcaatgctggccgcgcatccggacatcgagaaaatctcgtttaccggcggcgtggaaacgggcaagaaggtgatgtcactggcgggcgcatcgtcactgaaagaagtgacgatggaactcggcggcaagtcccccctgctcgtattcgacgacgccgatctcgaacgcgccgccgacattgcgatgagcgccaacttcttcagctccggccaggtgtgcaccaacggcacgcgcgtgttcgtgcaacgcggcgtattggaacgcttcgaggcgttagtgctggaacgcgtcaagcgcattcgcgtgggcgcgccaaccaacgccgccaccaacttcggtccgctcgcgagcgccgcgcaattgcagaaggtgctggggtacatcgaaagcggcaagcaggaaggcgcgcggctcatggcgggcggcaagcgtctcaccgaaggtcacttcggcaacggccagtacgtcgagccgaccgtattcaccggctgccatgacgacatgcgcatcgtgcgcgaggagatcttcggcccggtcatgagcattctcgtgttcgacgacgaagacgaagccatcgcgcgcgcgaaccgcaccgcttatggtctcgccgcgggcgtcgtgaccgggaatctggcgcgcgcgcatcgcgtgattcatcgtctggaagcgggcatctgctggatcaacacgtggggcgagtcgccggcggaaatgccggtgggcggctacaagcaatcgggcgtgggccgcgaaaacggcctcaccacgctcgagcactacacgcgcatcaagtccgtgcaggtcgaactcggcccgtatcaaccggtgttctaa

SEQ ID NO: 284 - protein, 489 aa, Burkholderia xenovorans LB400
MAVFAIQRLYIGGAYVDATSGETFDTLDPATGETLASVQQASAADVERAVQSAREGQREWAALTAMQRSRVLRRAVEILRERNDELAALETRDTGKPIAETLAVDIATGADVIEYYAGLATAIEGQQIPLRPTSFVYTRREPLGVCAGIGAWNYPIQIACWKSAPALAAGNAMIFKPSEITPLSALKLAEIYTEAGVPAGVFNVVQGDGRVGAMLAAHPDIEKISFTGGVETGKKVMSLAGASSLKEVTMELGGKSPLLVFDDADLERAADIAMSANFFSSGQVCTNGTRVFVQRGVLERFEALVLERVKRIRVGAPTNAATNFGPLASAAQLQKVLGYIESGKQEGARLMAGGKRLTEGHFGNGQYVEPTVFTGCHDDMRIVREEIFGPVMSILVFDDEDEAIARANRTAYGLAAGVVTGNLARAHRVIHRLEAGICWINTWGESPAEMPVGGYKQSGVGRENGLTTLEHYTRIKSVQVELGPYQPVF

SEQ ID NO: 285 - DNA, 1485 bp, Burkholderia xenovorans LB400
  CDS (1)..(1485): transl_table=11
atgaatgcaaatccgaaacacgtcgcggatccgaccaggcttcgtaatcagaatctgattggcggccagtggaaagctgcgctttctggccagtcgatcgccgtcgagaatcccgcgaatgaagagatcatcgcgcaagtcccgagaggacagcaggaggatatcgacgaggcagtgaaagttgcgcgggcgacgttcgagtcggctgcgtggcgcaagattcgtcccatcgaccgcggtcgcatcctggagaacatcgcgcgcaaggtcgaagagcacgccgaggaactgtcctggctggagtctctggacactggcaaggcgatctcgttcgccagggtcatcgatcttccctcgaccgttgacgtgttccgttacatgggcggctggtgctccaagctgggcggtacgactccgcctatctctttcgatggaaaggaataccacgcttacacgcgtcgcgagccggtgggcgtggtcggtgcgatcacgccatggaactacccgctcgcactgggctcctggaagatcgcatcagcgctcgccgcggggtgcacgatggtgctgaagcccaccgagctcacgccgctcagcacgcttcggctggccgaattgtgtcttgaggcggggttgccggaaggggcactgaacgtcgtcaacggctacggccatgaggccggtgaggcgctggcgcgtcaccccgacatcgacaagatcaccttcacgggatcgacggtggtgggcaagaagattgtcgagtacgcgcttggcaacatgaagcgcgtgacgctcgaactgggcggcaagtctccaagcatcgtgttcgacgacgctgatcttgatcaggtcggcctcggtgcagcacttgctgtcttcttcaactccgggcagatctgttttgctgccagccgcctgttcgtccaggccagcgtctacgatcgcgtcgtcgaagctgttgccgccgtggcgtcgcagttcaaggtgggcaacgggcaggacaccgacaccatgctcgggccgcttgtgtcccgtaagcagcaggagcgggtcctcggctacgtccaatctggcatcgagcagggcgcaagcctcatctacggcggccagaaaatcggcgacaagggctacttcctgcagcccacggtgtttgcggatgcggatcagtcgatgaagatcgcgcaggaggagatttttgggcccgtggtgagcatcatccgcttcaaggacgaggtggaggccattcgtcttgcaaacgacacaacgtatggactggccgccaacatctggacgcgcgatatcaagaaagcgcatcgggtcgcccaccggttgcaggccggatcggtgtggatcaactgccacggcgtcatcgacccggcggcgccatttggcgggttcaaacagtcgggctggggacgtgaggtgtcagaagaggggcttgccgcatacaccgaaatcaagacggtctgtgcgttgctggatgactga

SEQ ID NO: 286 - protein, 494 aa, Burkholderia xenovorans LB400
MNANPKHVADPTRLRNQNLIGGQWKAALSGQSIAVENPANEEIIAQVPRGQQEDIDEAVKVARATFESAAWRKIRPIDRGRILENIARKVEEHAEELSWLESLDTGKAISFARVIDLPSTVDVFRYMGGWCSKLGGTTPPISFDGKEYHAYTRREPVGVVGAITPWNYPLALGSWKIASALAAGCTMVLKPTELTPLSTLRLAELCLEAGLPEGALNVVNGYGHEAGEALARHPDIDKITFTGSTVVGKKIVEYALGNMKRVTLELGGKSPSIVFDDADLDQVGLGAALAVFFNSGQICFAASRLFVQASVYDRVVEAVAAVASQFKVGNGQDTDTMLGPLVSRKQQERVLGYVQSGIEQGASLIYGGQKIGDKGYFLQPTVFADADQSMKIAQEEIFGPVVSIIRFKDEVEAIRLANDTTYGLAANIWTRDIKKAHRVAHRLQAGSVWINCHGVIDPAAPFGGFKQSGWGREVSEEGLAAYTEIKTVCALLDD

SEQ ID NO: 287 - DNA, 1458 bp, Silicibacter sp. TM1040
  CDS (1)..(1458): transl_table=11
atgacacatccggcccagcccaaagccagccatttcatcaatggcgaatatgtcgaagacacctccggcaccccgatcccggtgatctatgctgccactggcgagaccatcgccaccgtttacgcggccacacctgcaatcgtcgagcaggcgctgaccgccgctgaggctgcgcagaaagaatgggccaagatgtccggcaccgagcgcggccgggtgctgcgccgcgccgccgacatcatgcgtgaacgcaatcacgaactgtcggtgctggaaacctatgacaccggcaagcccctgcaggaaaccctggtcgcggatgccacctctggtgcggatgcacttgaatatttcgggggcctcgcgggcagcctcaccggcgagcacatccagcttggcgaagactgggtctataccgtgcgcgagccgcttggcctctgtgtggggatcggcgcgtggaactaccccacccagatcgcctgctggaagggcgcaccggcattggcctgtggcaacgccatggtgttcaaaccttccgagaccacgccgctctgcgcgctcaaggtggccgagatcctgatggaggccggcgcgccagccgggctttacaacgtcattcagggcatgggcgaagtgggcggcaaactggtcacggacccgcgcgtcgacaaggtctcgctcaccggctccgttccgaccggcaaaaaggtctatgcggctgcggctgagggcatgaaacatgtaaccatggagctgggtggcaaatccccgatgatcgtctttgaagacgccgacatcgagagcgccatctccggtgccatcaacggcaacttctattcctcgggtcaggtctgctcgaacggcacccgcgtctttgttcacaaggacatcaaggagaagttcctcgcccgtctggccgagcgcactgcgacagccaaactgggcgatccgatggatgagagcgtgaactttggcccgatggtcagcgagcgccagatggagatcgtgctcggttatatcgagaagggcaaatccgagggcgcgcgcctgatttgtggtggcaaccgcgctgatatggatggcttttttgtggagcccacggtctttgccgatgtcaaagacgatatggtgatcgcccgcgaagagatctttggcccggtcatgtgcgttttggatttcgagagcgaagacgaggtgatcgcccgcgccaatgataccgaatttggtctctcggcaggggtcttcaccaaggatttcacccgcgcgcaccgggtgatcggtcagcttgaggccggcagctgctttatcaattcctacaatgacgcacccgtcgaggcgccctttggtggcgtcaaagcctctggcgtggggcgtgaaaattccaaggaagcgatcaagcacttcagccaggtgaagtcggtctacgtgcgcatgggcgactgcgaagcagccttctaa

SEQ ID NO: 288 - protein, 485 aa, Silicibacter sp. TM1040
MTHPAQPKASHFINGEYVEDTSGTPIPVIYAATGETIATVYAATPAIVEQALTAAEAAQKEWAKMSGTERGRVLRRAADIMRERNHELSVLETYDTGKPLQETLVADATSGADALEYFGGLAGSLTGEHIQLGEDWVYTVREPLGLCVGIGAWNYPTQIACWKGAPALACGNAMVFKPSETTPLCALKVAEILMEAGAPAGLYNVIQGMGEVGGKLVTDPRVDKVSLTGSVPTGKKVYAAAAEGMKHVTMELGGKSPMIVFEDADIESAISGAINGNFYSSGQVCSNGTRVFVHKDIKEKFLARLAERTATAKLGDPMDESVNFGPMVSERQMEIVLGYIEKGKSEGARLICGGNRADMDGFFVEPTVFADVKDDMVIAREEIFGPVMCVLDFESEDEVIARANDTEFGLSAGVFTKDFTRAHRVIGQLEAGSCFINSYNDAPVEAPFGGVKASGVGRENSKEAIKHFSQVKSVYVRMGDCEAAF

SEQ ID NO: 289 - DNA, 1512 bp, Rubrobacter xylanophilus DSM 9941
  CDS (1)..(1512): transl_table=11
atgagcgcccccgcttcggaggttcaccccaagctcttcatcgccaatgagtggagacccagccataccggccagacattcgagacggtggacccctcgaccgaagaggttatcgcatctatcccgcgcggaggcgccgaggacgtcgatgaagctgtgagcgccgccagggaggccttcaacggcccctggcggcgcctcacccccgaggatcgggccagattcctctaccaggtggcaaggagccttgagtccagattggaagaattcgcccggctggagacgctggataccggcaaacctctgcaacattctcgaaacgagatccgaaattgcgtgcgctattttgattactatgccggcgccgccgacaagatccacggcgagaccatcccgctgggtcccaattacctggactacacggtccgcgagccgctcggcgtgaccgcacacatcgtgccatggaacgtgcctttaggcatggtctgccgcagcctggctccagcactggccgccggcaatgcagccgttgtgaagccagcagagcagacgccgcttaccgctcttaagctcgcggagctcttcctggagctagacgccccgccgggcgtctacaacgtggtgaccggctttggggaagaggcgggtcgggcgttgagcgagcatcctggcatagattcgatcaccttcaccggttctgtggagacgggccgtgccgttctcagagccgcggcggagcacgtaaggccggtcgttttagagctcggcggcaagtctccgcaggttgtattcgcagactgcgacctcgattttgctgcggacgaagtagcgaagggaatctactccaattcggggcagtattgcgacgcgggctcccggctgctgatcgatggctcgatcaaagagccttttttggagaaggtgatcgaacgcgcacgagcaataaaactcggcgcagggatggacgaacctgacatgggaccgctggtctccgaggagcatttcaagcgcgttctgggctatatagaagtgggaaataaggagggcgcgcgcatgctcaccggcgggcgtgccgaggggtttgagagagggtactttgttgcccccaccatcttcgacgaggtagaaagcaacatgcgcatcgcccaggaagagatcttcggtccggtgttggccacgttgtcttttggcagcgaagttgaagccatcgagatcgcaaacgactccagctatggattggcggctggcatctttacccgcgatatagatcgagcactgcgcttcgcaagcgagattcaagccggttatgtaatgatcaatgaatatttctcgggcggcatgggctcgccgtttggcggctataagcagagtggcatcggcagggagagaggcttgatagcgctggacaactacacgcagatcaagaacgtcgtggtgaaggtcgggcagagacttccacgccgctctgcgggcatacaagacgcgcttgcaccaattaccaagccaggatga

SEQ ID NO: 290 - protein, 503 aa, Rubrobacter xylanophilus DSM 9941
MSAPASEVHPKLFIANEWRPSHTGQTFETVDPSTEEVIASIPRGGAEDVDEAVSAAREAFNGPWRRLTPEDRARFLYQVARSLESRLEEFARLETLDTGKPLQHSRNEIRNCVRYFDYYAGAADKIHGETIPLGPNYLDYTVREPLGVTAHIVPWNVPLGMVCRSLAPALAAGNAAVVKPAEQTPLTALKLAELFLELDAPPGVYNVVTGFGEEAGRALSEHPGIDSITFTGSVETGRAVLRAAAEHVRPVVLELGGKSPQVVFADCDLDFAADEVAKGIYSNSGQYCDAGSRLLIDGSIKEPFLEKVIERARAIKLGAGMDEPDMGPLVSEEHFKRVLGYIEVGNKEGARMLTGGRAEGFERGYFVAPTIFDEVESNMRIAQEEIFGPVLATLSFGSEVEAIEIANDSSYGLAAGIFTRDIDRALRFASEIQAGYVMINEYFSGGMGSPFGGYKQSGIGRERGLIALDNYTQIKNVVVKVGQRLPRRSAGIQDALAPITKPG

SEQ ID NO: 291 - DNA, 1509 bp, Rhodococcus sp. RHA1
  CDS (1)..(1509): transl_table=11
atgacagcgacgatcgaacccagccaagcggaactcttgccgtcggtacggaactttctgtccggcaccaagcgatttctcgtcggagggcagtgggtggaatcggcgagcggcgagacgttcgagacgatcgacccggccaccgggcaggtgctgaccaccgtcgcacgcggtggtgccgaagacgtagaccgcgcggtccgggccgctcgtacggcattcgacgagggcccgtgggccaccatgaagcccaacgagcgggaacggctgatctggcgggtcggcgacatcctctccgagcgcgccgaggaattcggtcagctcgaggcgctggacaacggcaagtcggcgggcatcgccgcggctgtcgacgtcgcctggtcggccgacatcttccgctacttcgcgggctgggccaccaagatcgagggcagcacggtcaacgtgagcatgccgttcgtccccggcggccagttccatgcgtacacgctgcgcgaacccgtcggcgtctgcggtctgatcgttccctggaacttcccgctgctcatggccgcattcaagctggcgcccgcgctcgccgcaggcaacacggtgattctcaagcccgcggagcagaccccgctcaccgcgatcctgctcggcgaggtgttcgaggaggccggcttcccgcccggcgtcgtcaacatcgtcaccggctacggcgacgccggcgcggcattgtccgcccacgacgacgtcgacaagattgcgttcaccggctccaccgaggtcgggaagaagatcgtcgacgccgcccggggcaacctcaagaaggtgtcgctcgaactcggcggcaagagcgccaacgtcgtgttcgcggacgccgacttcgacgccgccgtcaccggatcgctcaacgcctggctgttcaaccacggccagtgctgcgtcgcaggcacccggatgttcgtcgaggacagcatcttcgacgacttcaccgcagcggtcgccgaggccgccagccaggtcaagatcggccccggactcgaccccaccacccagctcggaccgctggtgtcgcaggagcagttcgacaaggtcaccggctacctggccgccggactcgccgacggcgcccgcgccctcaccggcggaaagcgctggggcgacaccggcttctatgtcgagccgacggtgttcgtggacgtgaaacccgagttcagcatcgtggaggaggagatcttcggccccgtcgtcgcagcgctcccgttcaacgcagaggagggagtcgcgaaggcggcgaacagcagcatctacggcctcgccgccggaatctggaccaaggatctgtccaaggcgcacctcacggcccgtcagctcaaggccggttcggtgtggatcaatcagtacaacgggttcgacaccgccatgccgttcggcggatacaagcagtccggttggggacgtgagctcggggcgaccgccatcgatctctacacccagaccaaagccgtcaacatcgcactctga

SEQ ID NO: 292 - protein, 502 aa, Rhodococcus sp. RHA1
MTATIEPSQAELLPSVRNFLSGTKRFLVGGQWVESASGETFETIDPATGQVLTTVARGGAEDVDRAVRAARTAFDEGPWATMKPNERERLIWRVGDILSERAEEFGQLEALDNGKSAGIAAAVDVAWSADIFRYFAGWATKIEGSTVNVSMPFVPGGQFHAYTLREPVGVCGLIVPWNFPLLMAAFKLAPALAAGNTVILKPAEQTPLTAILLGEVFEEAGFPPGVVNIVTGYGDAGAALSAHDDVDKIAFTGSTEVGKKIVDAARGNLKKVSLELGGKSANVVFADADFDAAVTGSLNAWLFNHGQCCVAGTRMFVEDSIFDDFTAAVAEAASQVKIGPGLDPTTQLGPLVSQEQFDKVTGYLAAGLADGARALTGGKRWGDTGFYVEPTVFVDVKPEFSIVEEEIFGPVVAALPFNAEEGVAKAANSSIYGLAAGIWTKDLSKAHLTARQLKAGSVWINQYNGFDTAMPFGGYKQSGWGRELGATAIDLYTQTKAVNIAL

SEQ ID NO: 293 - DNA, 1461 bp, Pseudomonas putida
  CDS (1)..(1461): transl_table=11
atgaaagaaatcaagcatttcattagcggtgccttcgtcggttcggccagcggcaagctgttcgacaatgtcagcccggccaacggccaggtgatcggccgcgtccacgaggccggccgcgccgaggtcgacgctgcggtcaaagctgcccgtgccgcgctcaagggaccctgggggaagatgacggtggccgagcgcgctgagattctgcatcgcgtggccgatggcatcacggcgcgcttcgacgagtttctcgaggccgaatgcctcgacaccggcaagccgaagtcgctggccagccacatcgacattccgcgcggcgcggccaatttcaaggtattcgccgacctgctcaagaatgttgccaatgacgccttcgagatggccaccccggacggcgccggtgcactcaactacggcgtgcgccggcccaagggggtgatcggggtgatcagcccgtggaacctgccgctgctgctgatgacctggaaagtcggcccggcgctggcctgcggcaactgcgtggtggtcaagccatccgaggaaaccccgctgaccgccaccctgctcggcgaggtgatgcaggccgctggcgtgccggccggcgtgtacaacgtggtgcacggtttcggcggcgattcggccggggccttcctcaccgagcacccggacgtcgacgcctacaccttcaccggcgagaccggcaccggcgaaaccatcatgcgcgccgcggccaagggcgtgcgccaggtgtcgctggagctgggcggcaagaacgccggcatcgtcttcgccgactgtgacctggacaaggccatcgagggcaccctgcgctcggccttcgccaactgcggccaggtctgcctgggcaccgagcgggtgtatgtcgagcggccgatcttcgacgcgttcgtcgcccgcctgaaggccggcgccgaagcgttgaagatcggcgaaccgaacgatccagaggccaatttcggcccgctgatcagccacaagcaccgtgaaaaagtcctcagttactaccagcaggcagtcgacgacggcgccaccgttgtcaccggcggcggcgtgccggagatgccggcgcacctcgccggcggcgcctgggtgcagccgactatctggaccggcctggccgacgattcggcggtggtcaccgaggaaatcttcggcccgtgctgccatatccgcccgttcgaccgcgaggaggaagccattgaactggccaacagcctgccttacggcctggcctcggcgatctggaccgagaacgcttcgcgcgcccaccgcgtcgccgggcagattgaggccggcatcgtctgggtcaacagctggttcctgcgcgacctgcgcactgccttcggcggcagcaagcagtcgggtattggccgcgaagggggtgtgcactcgctggagttctacaccgagctgaaaaacatctgtgtgaaactctga

SEQ ID NO: 294 - protein, 486 aa, Pseudomonas putida
MKEIKHFISGAFVGSASGKLFDNVSPANGQVIGRVHEAGRAEVDAAVKAARAALKGPWGKMTVAERAEILHRVADGITARFDEFLEAECLDTGKPKSLASHIDIPRGAANFKVFADLLKNVANDAFEMATPDGAGALNYGVRRPKGVIGVISPWNLPLLLMTWKVGPALACGNCVVVKPSEETPLTATLLGEVMQAAGVPAGVYNVVHGFGGDSAGAFLTEHPDVDAYTFTGETGTGETIMRAAAKGVRQVSLELGGKNAGIVFADCDLDKAIEGTLRSAFANCGQVCLGTERVYVERPIFDAFVARLKAGAEALKIGEPNDPEANFGPLISHKHREKVLSYYQQAVDDGATVVTGGGVPEMPAHLAGGAWVQPTIWTGLADDSAVVTEEIFGPCCHIRPFDREEEAIELANSLPYGLASAIWTENASRAHRVAGQIEAGIVWVNSWFLRDLRTAFGGSKQSGIGREGGVHSLEFYTELKNICVKL

SEQ ID NO: 295 - DNA, 1464 bp, Rhizobium leguminosarum bv. viciae 3841
  CDS (1)..(1464): transl_table=11
atgaaagcccagccgaaagcctcgcacttcatcgacggcgaatatgtcgaggataccgatggcaccgtcatcgagagcctctatccggcgactggcgaggtgatcgcccggctgcatgccgcaacgcccgcgatcgtcgaacgggcgatcgcagccgccaagcgcgcccagccggaatgggcggcgatgagcccgatggcgcgcggccgcatcctgaagcgggcagccgacatcatgcgcgagagaaaccgggtgctttccgaactcgagacgctcgacaccggcaagccaatccaggagactgttgtcgccgacccgacctcgggtgcggatgccttcgaattcttcggcggcatcgcgccggccggcctcaacggttcgcatatcccgctcggccaggatttcgcctataccaagcgggtgccgctcggcgtctgcgtcggtatcggcgcctggaactatccgcagcagatcgcctgctggaaagctgcgccggcgcttgtctgcggcaatgccatggtgttcaagccgtcggagaacacgccgctcggcgcattgaagatcgccgagatcctgcacgaggcgggactgccgaaggggctcttcaacgtgatccagggcgaccgcgacaccgggccgctgctggtcaaccatcccgacgtcgccaaggtgtcgctgaccggctcggtgccgaccggccgcagggtggcggccgctgccgccggcaacctcaagcacgtgacgatggagctcggcggcaagtcgccgcttgttgtcttcgacgatgccgatctcgattcggcggtcggcggcgcgatgctcggcaatttctattcgaccggccaggtctgctcgaacggcacgcgcgtcttcgtgcagaagacgatcaaggacgaattcctcaagcggctgaaggtccgcaccgaggcgatgctgatcggcgatccgatggacgaggcgacgcaggtggggccgatggtctcctgggcgcagcgcgaaaaggtgatctcctacatcgagaagggcaaggccgagggcgcgacgctgatcgccggtggcggcattccgaacaatgtctccggcgaaggctattacgtgcagccgacagtctttgccgatgtcaccgacgacatgaccatcgcccgcgaggagatcttcggccccgtgatgtgcgtgctcgatttcgacgccgaggacgaggtgatcgcgcgcgccaatgccagcgaattcggcctttccggcggcgtctttaccgccgacctcacccgcgcccaccgcgtcgtcgaccggctggaagcgggcacgctgtggatcaacacctacaatctctgcccggtggaaatccccttcggcggctcgaaacaatccggcttcggccgcgagaattcgctggccgcgctggagcattattccgagctgaagaccgtctatgtgggcatggggccggtggtggcgccttattga

SEQ ID NO: 296 - protein, 487 aa, Rhizobium leguminosarum bv. viciae 3841
MKAQPKASHFIDGEYVEDTDGTVIESLYPATGEVIARLHAATPAIVERAIAAAKRAQPEWAAMSPMARGRILKRAADIMRERNRVLSELETLDTGKPIQETVVADPTSGADAFEFFGGIAPAGLNGSHIPLGQDFAYTKRVPLGVCVGIGAWNYPQQIACWKAAPALVCGNAMVFKPSENTPLGALKIAEILHEAGLPKGLFNVIQGDRDTGPLLVNHPDVAKVSLTGSVPTGRRVAAAAAGNLKHVTMELGGKSPLVVFDDADLDSAVGGAMLGNFYSTGQVCSNGTRVFVQKTIKDEFLKRLKVRTEAMLIGDPMDEATQVGPMVSWAQREKVISYIEKGKAEGATLIAGGGIPNNVSGEGYYVQPTVFADVTDDMTIAREEIFGPVMCVLDFDAEDEVIARANASEFGLSGGVFTADLTRAHRVVDRLEAGTLWINTYNLCPVEIPFGGSKQSGFGRENSLAALEHYSELKTVYVGMGPVVAPY

SEQ ID NO: 297 - DNA, 1473 bp, Pseudomonas aeruginosa UCBPP-PA14
  CDS (1)..(1473): transl_table=11
atggcccgattcgaagaacagaagctctacattggcggtcgctacgtggaggccagcagtggcgccaccttcgagaccatcaacccggccaacggcgaagtgctcgccaaggtccagcgggcttccagggaagacgtcgagcgggccgtgcagagcgccgtcgaggggcagaaggtgtgggcggcgatgaccgccatgcagcgctcgcgcatcctccgtcgcgccgtcgacatcctccgcgagcgcaacgacgaactggccgccctggaaaccctggataccggcaagccgctggcggaaacccgctcggtggacatcgtcaccggcgccgacgtgctcgagtactacgccggcctggtcccggccatcgaaggcgagcagattcccctgcgcgaaaccagtttcgtctacacccgccgcgagccgctgggcgtggtcgccggcattggcgcctggaactacccggtgcagatcgccctgtggaaatccgccccggccctcgctgccggcaacgcgatgatcttcaagcccagcgaagtcaccccgctgaccaccctcaagctggccgagatctacaccgaggccggcgtgccggacggcgtgttcaacgtgctcaccggcagcggacgcgaagtcggccagtggctgaccgagcacccgctgatcgagaagatctccttcaccggcggcacctccaccggcaagaaagtcatggccagcgcttccagctcgtcgctgaaggaagtgaccatggagctgggcggcaagtccccgctgatcatcttccccgacgcagacctcgaccgcgccgccgacatcgccgtcatggccaacttcttcagctccggccaggtctgcaccaatggcacccgggtgttcatccaccgttcccagcaggcccgcttcgaagccaaggtactggagcgcgtgcagcgcatccgtctcggcgacccgcaggacgagaacaccaacttcggcccgctggtcagcttcccgcacatggaaagcgtgctcggctacatcgagtccggcaaggcgcagaaggctcgcctgctgtgcggcggcgagcgtgtgaccgatggagcgttcggcaatggcgcctacgtcgcgccgaccgtgttcaccgattgcagcgacgacatgaccatcgtccgcgaggaaatcttcggcccggtgatgagcatcctggtctatgacgacgaagacgaggcgatccgccgcgccaacgataccgagtacggcctcgccgccggcgtcgtgacccaggacctggcccgcgcccaccgcgccatccatcgcctggaagccggcatctgctggatcaatacctggggcgagtcgccggcggaaatgccggtcggcggttacaagcaatccggtgtcggtcgcgagaacggtctcaccaccctggctcattacactcgcatcaagtccgtgcaagtggagctgggcgactacgcctcggtgttctga

SEQ ID NO: 298 - protein, 490 aa, Pseudomonas aeruginosa UCBPP-PA14
MARFEEQKLYIGGRYVEASSGATFETINPANGEVLAKVQRASREDVERAVQSAVEGQKVWAAMTAMQRSRILRRAVDILRERNDELAALETLDTGKPLAETRSVDIVTGADVLEYYAGLVPAIEGEQIPLRETSFVYTRREPLGVVAGIGAWNYPVQIALWKSAPALAAGNAMIFKPSEVTPLTTLKLAEIYTEAGVPDGVFNVLTGSGREVGQWLTEHPLIEKISFTGGTSTGKKVMASASSSSLKEVTMELGGKSPLIIFPDADLDRAADIAVMANFFSSGQVCTNGTRVFIHRSQQARFEAKVLERVQRIRLGDPQDENTNFGPLVSFPHMESVLGYIESGKAQKARLLCGGERVTDGAFGNGAYVAPTVFTDCSDDMTIVREEIFGPVMSILVYDDEDEAIRRANDTEYGLAAGVVTQDLARAHRAIHRLEAGICWINTWGESPAEMPVGGYKQSGVGRENGLTTLAHYTRIKSVQVELGDYASVF

SEQ ID NO: 299 - DNA, 1503 bp, Azoarcus sp. BH72
  CDS (1)..(1503): transl_table=11
gtgaccctgtaccccgaccaactcatcagccccgccacccgcgccttcctcgcccgccccaaacgtatgctgatcggcgccgaatggtccgccgccgtcagcggtgaaaccctggcggtgctcgatccggcgaccgggcaggctttcgccacggtgccggctggcggtgccgccgacatcgaccgcgcggtggccgctgcccgccgtgccttcgaatccggcgagtggccgaagatgcggccggtggaccgcgagcgcctgctgctcaagttcgccgacctgatcgaagccaacgcccaggaactcgccgagatcgaggcgctggacaacggcaagccggtgatgatggcgcgccatgtggatgtggcgctggtggtcgatttcctgcgctacatggcgggctgggcgaccaagatcgaaggctcgacgatggacgtgtcggtgccgctgatgcgcgaccgcgaactcttcggctttacccgccgcgagccggtgggcgtggtcggcgccatcatcccgtggaatttcccgctgctgatggcggcgtggaaggttggcccggcgctgacctccggctgcaccatggtgttgaagccggccgaagaaacgccgctcaccgcgttgcgcttcgccgaactcgcgctggaagccggctacccggccggcgtgctcaacgtcgtcactggccacggcgacaccgccggcgcggcgctcgccagccacaagggcatcgagaaggtggccttcaccggctccaccgagatcggcaagctggtcggcaaggcggcgatcgacaacatgacgcgggtgtcgctggaactgggcggcaagagcccggtgatcgtgctcgacgatgccgatcccgcgatggccgcggccggcgcggcgcaggcgatcttcttcaatcagggccaggtgtgcaccgccggctcgcggctattcatccacaagagccgcttcgagaaggtggtggaggggctgtccggcattgcggcgtcgatgaagctcgggccgggcatcgatccctccacccagatcggtccgctggtgtcggcggtgcagcagcagcgcgtgctcggctacatcgagagcgggcttgcggaaggcgccagggcggccaccggcggcggagcgggcggcgaggccggctacttcgtcaagccgacggtactggtgaacgcccacgacgcgatgaaggtggtgcgcgaggagatcttcggcccggtggtggtggcgatgccctacgaggacctcgatgaagttgcccaccgcgccaacgacacgccctacggcctggcggcgagcatctggtccaacgacctgacccgggtgcaccggctgatccccaagatcaaggccggcaccgtgtgggtgaactgccacaacatcctcgacaacgcgatgcccttcggcggttacaagcagtccggtatcggccgcgagatgggccgggcggtgctcgacatgtacaccgaatccaagtcggtgatcatggcgctctaa

SEQ ID NO: 300 - protein, 500 aa, Azoarcus sp. BH72
MTLYPDQLISPATRAFLARPKRMLIGAEWSAAVSGETLAVLDPATGQAFATVPAGGAADIDRAVAAARRAFESGEWPKMRPVDRERLLLKFADLIEANAQELAEIEALDNGKPVMMARHVDVALVVDFLRYMAGWATKIEGSTMDVSVPLMRDRELFGFTRREPVGVVGAIIPWNFPLLMAAWKVGPALTSGCTMVLKPAEETPLTALRFAELALEAGYPAGVLNVVTGHGDTAGAALASHKGIEKVAFTGSTEIGKLVGKAAIDNMTRVSLELGGKSPVIVLDDADPAMAAAGAAQAIFFNQGQVCTAGSRLFIHKSRFEKVVEGLSGIAASMKLGPGIDPSTQIGPLVSAVQQQRVLGYIESGLAEGARAATGGGAGGEAGYFVKPTVLVNAHDAMKVVREEIFGPVVVAMPYEDLDEVAHRANDTPYGLAASIWSNDLTRVHRLIPKIKAGTVWVNCHNILDNAMPFGGYKQSGIGREMGRAVLDMYTESKSVIMAL

SEQ ID NO: 301 - DNA, 1485 bp, Bacillus cereus G9241
  CDS (1)..(1485): transl_table=11
atgagtcaactagctgtaaatcttcatgaaaaggtagaaaagtttcttcaaggtacaaaaaagttatatgtgaatggattcttcattgaaagcgcttccggcaaaacgtttaatacacctaacccagcaactggcgaaacacttgccgtcgtttctgaagccggtcgcgaagatattcataaagctgtagttgcagctcgcatggcttttgacgaaggtccttggtctcgcatgagcacagctgagcgaagccgtcttatgtacaagttagctgatttaatggaagaacataaagaagagcttgcacagcttgaaacattagataacggaaagccaatccgtgaaacaatggcagcagacataccactcgcaattgaacatatgcgctattatgccggctgggcgacgaaaatcgttggtcaaacaatccctgtctccggtgattactttaactatacacgccatgaagctgttggtgtcgttggtcaaattatcccttggaacttcccgcttcttatggcaatgtggaaaatgggagcagcgcttgctacaggatgtacaatcgtattaaaacctgcagaacaaactccactatctgctctatacttagctgaattaattgaagaagctggattcccgaaaggtgttattaatatcgttcctggattcggtgaatcagctggacaagctctcgttaatcacccacttgttgataaaattgcatttaccggttctactccagtcggtaaacaaattatgcgacaagcatctgaaacattaaaacgtgttactttagagcttggtggtaaatcaccaaacattattttaccagatgccgacttatctcgtgcaattcctggtgcactttctggtgttatgtttaaccaaggacaagtatgctctgctggatcacgcctatttgttccgaagaaaatgtatgataatgtcatggctgaccttgtcctttactctaaaaaattaaatcaaggtgctggcttaagcccagaaactacaatcggtcctctcgtttctgaagaacaacaaaaacgtgtaatgggctacattgaaaaaggaattgaagaaggtgctgaagtactttgcggaggaagtaacccattcgatcaaggctacttcgtttctcctaccgtattcgctgacgtaaatgatgaaatgacaatcgcaaaagaagaaattttcggtccagttatttctgcaattccgtttaacgatattgatgaagtaattgaacgtgcaaataaatcacaattcggcttagcggctggtgtgtggacagaaaatgttaaaacagcacactatgttgcaagtaaagtacgtgctggtacagtatgggtaaactgttataacgtctttgatgcagcatctccatttggaggatttaaacagtctggtcttggtcgtgaaatgggatcttatgcattaaataactatacagaagtgaagagcgtttggcttaacttaaattaa

SEQ ID NO: 302 - protein, 494 aa, Bacillus cereus G9241
MSQLAVNLHEKVEKFLQGTKKLYVNGFFIESASGKTFNTPNPATGETLAVVSEAGREDIHKAVVAARMAFDEGPWSRMSTAERSRLMYKLADLMEEHKEELAQLETLDNGKPIRETMAADIPLAIEHMRYYAGWATKIVGQTIPVSGDYFNYTRHEAVGVVGQIIPWNFPLLMAMWKMGAALATGCTIVLKPAEQTPLSALYLAELIEEAGFPKGVINIVPGFGESAGQALVNHPLVDKIAFTGSTPVGKQIMRQASETLKRVTLELGGKSPNIILPDADLSRAIPGALSGVMFNQGQVCSAGSRLFVPKKMYDNVMADLVLYSKKLNQGAGLSPETTIGPLVSEEQQKRVMGYIEKGIEEGAEVLCGGSNPFDQGYFVSPTVFADVNDEMTIAKEEIFGPVISAIPFNDIDEVIERANKSQFGLAAGVWTENVKTAHYVASKVRAGTVWVNCYNVFDAASPFGGFKQSGLGREMGSYALNNYTEVKSVWLNLN

SEQ ID NO: 303 - DNA, 1473 bp, Crocosphaera watsonii WH 8501
  CDS (1)..(1473): transl_table=11
atggtcacagcaacacgaccagaaaacaaagttaaaattggcccaacccaactattaatcaataacaaatgggtcgaaagtgcatcaggaaaacgctttgaaaccatcaaccccagcacaggagaagtgatctgtgatgtggcagaagcagatgcagccgacgtagataaagccgtcatcgctgccagaaacgcctttaaccagggggactggcccaaactatcagccactcaacggggacaactgttatacaagttagctgatttaatcgaagctaacatcgaagaattagcccgtctagaaactttagataacggaaaaccctatcaagactccttaaacgcagatttacagcttgtcattgcctgttaccgttactatgcagggtgggctgacaaaattcaaggaaaaactattcccatcaacggaccctatttttgttatactcgtcacgaaccagtgggagtggtgggccaaatcattccttggaactttcccttactaatgcaagcatggaaactcgcccccgctttggctgccgggaacactgttgtcatgaaaaccgccgaacaaacccccctatccgctttgaggttaggagagttgatcctagaagcagggttccctccaggggtagttaacttactgtccggttatggccccacggccggacaagcgatcgcccgtcatcacgatatcgataaagttgcctttacgggatcgacagaagtgggccatttgatcatggaggcggccgcccaaactaacttaaagcgcgttaccttggaattaggtggtaaaagccctaatattgtctttgccgatgctaacctggaacaagccatcgaaggggcgcattttggcttattctttaaccagggtcaatgttgttgtgcaggatctcgtctgtttgtagaagagaagtgttatgacgagtttgtggctaaaagcgttgaacgggcaaaacaacggatagtaggtgatccttttgatgataacaccgctcaaggatcccaagtggatcgcactcagtttgataaggtgatggagtatattgagtcgggacaaagggaaggggcaaaactgttgtgtggtggaggccgtgtgggcgatcggggttactttattgaacccactgtcttcgctgaggtaaaagataatatgaaaattgcccaagaagagattttcggtccggtgatgagtattatcaagttcaaagatatggatgaggtgatccaacggaccaatgatactgtgtatggtttagcggccgctgtttggacccaggatattagtaaaggtcatgcgatcgctaatgctttacgtgcagggactgtctgggttaactgttacgatgtctttgatgcggctgctccctttggtggctttaaacagtcgggtatgggtcgagaattaggggaatatggcttacaacaatacacggaaattaaaacagtaaccgtcaaactttaa

SEQ ID NO: 304 - protein, 490 aa, Crocosphaera watsonii WH 8501
MVTATRPENKVKIGPTQLLINNKWVESASGKRFETINPSTGEVICDVAEADAADVDKAVIAARNAFNQGDWPKLSATQRGQLLYKLADLIEANIEELARLETLDNGKPYQDSLNADLQLVIACYRYYAGWADKIQGKTIPINGPYFCYTRHEPVGVVGQIIPWNFPLLMQAWKLAPALAAGNTVVMKTAEQTPLSALRLGELILEAGFPPGVVNLLSGYGPTAGQAIARHHDIDKVAFTGSTEVGHLIMEAAAQTNLKRVTLELGGKSPNIVFADANLEQAIEGAHFGLFFNQGQCCCAGSRLFVEEKCYDEFVAKSVERAKQRIVGDPFDDNTAQGSQVDRTQFDKVMEYIESGQREGAKLLCGGGRVGDRGYFIEPTVFAEVKDNMKIAQEEIFGPVMSIIKFKDMDEVIQRTNDTVYGLAAAVWTQDISKGHAIANALRAGTVWVNCYDVFDAAAPFGGFKQSGMGRELGEYGLQQYTEIKTVTVKL

SEQ ID NO: 305 - DNA, 1452 bp, Sulfitobacter sp. EE-36
  CDS (1)..(1452): transl_table=11
atgcaaacgcaacccatcgccagccatttcatcaacggcgaatatgtcgaagataccaacggcaccccgatcgaggtgatctatccggccacgggcgaggtcatcgcgaccgtctatgccgccacgccggaaatcgtcgagaaagccatcaccgccgcgcgggacgcgcaggctgcttgggccgcgatgaccggcaccgaacggggccgtatcctgcgccgcgccgctgacatcatgcgcgaacgcaaccacgatctgtcgatcctcgagacgtatgacaccggcaaaccctatcaggaaacctctgtcgcagacgccaccagtggtgccgatgcgctggaatatttcggcggtctggcggcctcgttgacgggggagcatatccagctgggcgaagattgggtctatacccgccgcgaaccgctgggggtctgtgttggcatcggcgcatggaactatccgacgcagatcgcctgctggaaaggcgcaccggcgctggcctgtgggaactcgatcatcttcaaaccgtccgagacgacgccgctttgcgcgctgaaagtcgcggaaattctggtagaggcagggctgcccgccggtctttataacgttgtgcaaggcatgggcgaagtgggggcctcccttgtgaccgacccgcgcgtcgataaagtctcgctcaccggttctgtgcccacgggccgcaaggtctatgccgcggccgccgaaggcatcaagcacgtcacgatggaactgggcggcaagtcccccatgatcgtgttcgaggacgccgatatcgagaacgccatcagcggcgcgatcttgggcaatttctacagctcgggtcagatctgttcaaacggcactcgcgtcttcgtgcaccgcgacatcaaagaggcgttcctgaaacgcttggccgaacgtctggacaccgccgtgatcggcgacccgatggaccctgacaccagctttggcccgatggtatcgaaacgtcagatggagatcgcgcttggctatgtcgaaaagggcaaggccgaaggcgcgcgtctggtctatggcggggcagcaatcgaccgcgatggcttctatatgcagcccaccgtctttgccgatgtgaccgacgacatgtccatcgcccgcgaagagattttcgggcccgtcatgtcggtgctggattttgagaccgaggcagaggtgatggcccgcgccaatgcgaccgaattcggtctcgccgccggtgtgttcaccaaagacctgtcccgcgcgcaccgcgtcgcggcggggttcgaggcgggcacctgctatatcaacacctataacgacgcaccggtcgaagctccctttggcggcatgaaaaattcgggcgtggggcgcgagaactccaaggcggcgattgatcactatagccagttgaaaaccgtctatgtgcgcatgggcgatatggaggcgcctttctag

SEQ ID NO: 306 - protein, 483 aa, Sulfitobacter sp. EE-36
MQTQPIASHFINGEYVEDTNGTPIEVIYPATGEVIATVYAATPEIVEKAITAARDAQAAWAAMTGTERGRILRRAADIMRERNHDLSILETYDTGKPYQETSVADATSGADALEYFGGLAASLTGEHIQLGEDWVYTRREPLGVCVGIGAWNYPTQIACWKGAPALACGNSIIFKPSETTPLCALKVAEILVEAGLPAGLYNVVQGMGEVGASLVTDPRVDKVSLTGSVPTGRKVYAAAAEGIKHVTMELGGKSPMIVFEDADIENAISGAILGNFYSSGQICSNGTRVFVHRDIKEAFLKRLAERLDTAVIGDPMDPDTSFGPMVSKRQMEIALGYVEKGKAEGARLVYGGAAIDRDGFYMQPTVFADVTDDMSIAREEIFGPVMSVLDFETEAEVMARANATEFGLAAGVFTKDLSRAHRVAAGFEAGTCYINTYNDAPVEAPFGGMKNSGVGRENSKAAIDHYSQLKTVYVRMGDMEAPF

SEQ ID NO: 307 - DNA, 1458 bp, Oceanicola batsensis HTCC2597
  CDS (1)..(1458): transl_table=11
atgacctacgacacgcagcccgaggccagccaccatatcggcggccgctacgtggaggacacggccggcgccgcgattccggtgatctacccggccaccggggaccggatcgcgaccgtccatgccgcaacggcgtctgtcgtggaccaggcgctggccgcggccgaggcggcgcagccggactgggccgccctcagcccgcgcgagcgcggtcgcatcctcacccgcgccgcacagatcatgcgcgcgcggaaccacgagctttcggtgctggagacgcgcgacaccggcaagcccctgcaggaaacgctcgtggccgacgccaccagcggggccgacgcgctggaatatttcggcggactggccggaaccctgaccggagagcacatccccctcggtcgggactgggtctacacgatccgcgaggcgcttggcgtctgcgtcgggatcggggcctggaattatcccacgcagatcgcctgctggaaggccgcgcccgcgctggcctgcggcaacaccatggtcttcaaaccgtccgagaccacgccgctctgcgcgctgaaggtggccgagatcctgaccgaggccggcgcgcctccgggtgtgttcaacgtggtgcagggcctgggcgagaccggggcgcggctggtcaccgatccgcgcgtcgccaaggtgtcgctgaccggctcggcccccacggggcgcaaggtctatgccgccgcggccgcggacatgaagcacgtgacgatggaactgggcggcaagtccccgatgatcgtcttcgacgacgccgatatcgagaacgcggtcggcggggcgatcctggggaacttctactcctcgggccagatctgttcgaacggcacgcgggtcttcgtgcacggcgccatcatggagcggttcctcgaccggctgactgcccggctgacgacggcggtgatcggcgaccccctggacgaggcgacctccttcggcccgatggtgagcgaggcgcagatgaacatcgtgctgggctatatcgacaagggccggaccgaaggcgcgcggctggtcaccggcggcaggcgcgtggaccgcgaggggttctacctcgaacccacggtcttcgccgacgtgaccgacgcgatgaccatcgcgcgcgaggagatcttcggccccgtcatgtcggtgctggacttcgacgacgaggacgaggtgatcgcccgcgccaatgccacggaatacggcctctcggccggggtcttcacccgcgacctcgcacgcgcacaccgggtgaccgggaagctgcgggccgggacctgtttcatcaactcctacaacgacgcgccggtcgaggcgcccttcggcggggtcaaggcgtcgggcgtggggcgcgagaacgcgcaggcggcggtcgaacactacagccagctcaaatccgtctacgtgcgcatgggcgacgtggaggcgcccttctga

SEQ ID NO: 308 - protein, 485 aa, Oceanicola batsensis HTCC2597
MTYDTQPEASHHIGGRYVEDTAGAAIPVIYPATGDRIATVHAATASVVDQALAAAEAAQPDWAALSPRERGRILTRAAQIMRARNHELSVLETRDTGKPLQETLVADATSGADALEYFGGLAGTLTGEHIPLGRDWVYTIREALGVCVGIGAWNYPTQIACWKAAPALACGNTMVFKPSETTPLCALKVAEILTEAGAPPGVFNVVQGLGETGARLVTDPRVAKVSLTGSAPTGRKVYAAAAADMKHVTMELGGKSPMIVFDDADIENAVGGAILGNFYSSGQICSNGTRVFVHGAIMERFLDRLTARLTTAVIGDPLDEATSFGPMVSEAQMNIVLGYIDKGRTEGARLVTGGRRVDREGFYLEPTVFADVTDAMTIAREEIFGPVMSVLDFDDEDEVIARANATEYGLSAGVFTRDLARAHRVTGKLRAGTCFINSYNDAPVEAPFGGVKASGVGRENAQAAVEHYSQLKSVYVRMGDVEAPF

SEQ ID NO: 309 - DNA, 1461 bp, Photobacterium sp. SKA34
  CDS (1)..(1461): transl_table=11
atggatatgaaatcactatatatagatggtaactatgttgctgcttcttctgatattcaatttacaacgtttaatccagctaatggtcagccgatagcaactattgggcaagcctctcaagctgatcttgagttagccattagtgcagctaaaaaaggctttgctatatggtcggctatgacggcaactgagcgtagccgtattttattacgtgctgttacgttactgcgagaacgcaacgatgaattagcggtattggaagtcacagataccggtaaaccgttacaagaagcgatagcggttgatatagaaaccggtgctgatgttattgagtactttgcagggttagcacctgggcttcaaggtgaacagcaacctttaagtgaaaatcagttcttttatacgcgtcgagaaccattgggcatttgtgctggtattggtgcgtggaattatccgatccaaattgcgatgtggaaatcagcgcctgcacttgctgcgggtaacgccatgattttcaaaccatcggaagaaacaccgttaacagttctaaagcttgctgagatttttactgaagcaggtctgcctgatggcgtttttaacgttgtacaaggtgattaccgagtggggcagatgctaacggcacaccctgagatcgctaaagtttcatttacaggtgaaactggtacaggtaaagcggtaatggctgatagtgctgataccttaaagtcggtcacgatggaattaggcggtaaatcgccaatgatcatttttgatgatgctaatgtcgatcatgctgtttcagcggcaatggtggctaacttctatacccaaggtgaagtatgtacacatggcacacgtgtttatgttcatgagactatttacgacacgtttatagagcaacttaagcgtcgaactgagttattaatcgttggtgatccgatgaatatggagacccaaattggcgcattgatttcaacatcacacctatcaaaagtgttatcagccatcgatgcagctaaacaaagtggcgcaatcttgctgactggtggataccaatatactgataatggtttagcacaaggtaatttcgttcaacctactgtttttattgattgcgatgaatctatgtctcacgttaaaaatgaaatttttgggccagtgatgtcggtaattaagtttagcgatgaaaccgatgttatcgctcgcgctaataatactcactatggtttagctgcgggtgtgtttacccaaaacttagcgagagcccaccgcgttatccatcaattacaagcagggatctgttgggttaatacatggggagattctcccgcgcaaatgcctgttggtggttataagcaatcagggattggacgcgaaaacggaatagaaaccttacaacattatacccaaaccaaaagtatacttattgagttgggcgattaccaaagtccttatgcgtaa

SEQ ID NO: 310 - protein, 486 aa, Photobacterium sp. SKA34
MDMKSLYIDGNYVAASSDIQFTTFNPANGQPIATIGQASQADLELAISAAKKGFAIWSAMTATERSRILLRAVTLLRERNDELAVLEVTDTGKPLQEAIAVDIETGADVIEYFAGLAPGLQGEQQPLSENQFFYTRREPLGICAGIGAWNYPIQIAMWKSAPALAAGNAMIFKPSEETPLTVLKLAEIFTEAGLPDGVFNVVQGDYRVGQMLTAHPEIAKVSFTGETGTGKAVMADSADTLKSVTMELGGKSPMIIFDDANVDHAVSAAMVANFYTQGEVCTHGTRVYVHETIYDTFIEQLKRRTELLIVGDPMNMETQIGALISTSHLSKVLSAIDAAKQSGAILLTGGYQYTDNGLAQGNFVQPTVFIDCDESMSHVKNEIFGPVMSVIKFSDETDVIARANNTHYGLAAGVFTQNLARAHRVIHQLQAGICWVNTWGDSPAQMPVGGYKQSGIGRENGIETLQHYTQTKSILIELGDYQSPYA

SEQ ID NO: 311 - DNA, 1464 bp, Oceanobacter sp. RED65
  CDS (1)..(1464): transl_table=11
atgagtcaacctgtctaccagtcttttgtgaatggcgagtttcttggcaatgccaatggcgaaacttttgatgtgatttacccggcaacgggtgaagtgatctataaagtagagcaagcggatgacaatgtgatggcgaaggccgttgagtccgccatcgcaggtcaaaaacaatgggctgccatgacaggtatcgaacgcagtcgaattttattgaaagcggtgcagttgttgcgtgagcgcaatgacgagctagctgaatttgaagttaaagatactggtaagccttggcaggaagcggtcgaggtggatgtcgttacaggcgcagatgctattgagttttttgccggtctagccccaagcattgaaggcaatcaacaagatttaggcggagacttttattacacccgtcgcgaaccattgggtgtatgcgcaggtattggtgcatggaactacccaatacaaatcgcttgctggaaatcggcaccggcactcgcggctggcaatagcatgatctttaaaccatccgaagaaacaccaatgggggcgattcagctcgctaaaatttttatagaagctggtgtgcctaaaggtgtgtttaatgtcattcaaggggattatcgagttggtcagatgctcacctcccatcctgatatcgccaaggtgagcttcacaggtgaagtgggaacgggcaaaaaagtcatggcggattctgcttcgagcttgaaagaagtcactatggaattaggtggcaagtcgccgctgattgtttttgatgatgctgatattgagcaagcggtaagcgcagccatgctgggtaacttttatacccaaggtgaaatatgtacgaacggaacacgtgtttttgttcaccgcagtattctgaatgagtttctagagcaactagccgaacgcacgaaaaacaatattgttgctggcgatccaatgaatccagaaacaaactttggcgcactgatttcagaaaaacatcacaagttggtattggattacattgaaaaaggcaaggccgaaaatgcaacgttactagccggtggtgaggccatgaagatcgaaggtttcgaaaatggttattttgttgcgccaaccatcttcaccgactgtaccgacgacatgaccatcgtaaaagaagaaatctttggtccagtcatgtcggtattggtatttgatgatgaggaggaagtaatcaaacgtgctaacgatactcatctcgggttggctgcaggtgtctttactcagaatattcaacgagcacaccgtgtgattcaccaaattgaagccggtatttgctggatcaatgcttatggtgcgtcacctgctgagatgcctgttggtggttataagcaatccggtatcggccgagaaaacggcaccattacgctgaatcattatacccaagtgaaatcggtttatatgggtatgaataaaattgaaagcccgttctag

SEQ ID NO: 312 - protein, 487 aa, Oceanobacter sp. RED65
MSQPVYQSFVNGEFLGNANGETFDVIYPATGEVIYKVEQADDNVMAKAVESAIAGQKQWAAMTGIERSRILLKAVQLLRERNDELAEFEVKDTGKPWQEAVEVDVVTGADAIEFFAGLAPSIEGNQQDLGGDFYYTRREPLGVCAGIGAWNYPIQIACWKSAPALAAGNSMIFKPSEETPMGAIQLAKIFIEAGVPKGVFNVIQGDYRVGQMLTSHPDIAKVSFTGEVGTGKKVMADSASSLKEVTMELGGKSPLIVFDDADIEQAVSAAMLGNFYTQGEICTNGTRVFVHRSILNEFLEQLAERTKNNIVAGDPMNPETNFGALISEKHHKLVLDYIEKGKAENATLLAGGEAMKIEGFENGYFVAPTIFTDCTDDMTIVKEEIFGPVMSVLVFDDEEEVIKRANDTHLGLAAGVFTQNIQRAHRVIHQIEAGICWINAYGASPAEMPVGGYKQSGIGRENGTITLNHYTQVKSVYMGMNKIESPF

SEQ ID NO: 313 - DNA, 1476 bp, Alteromonadales bacterium TW-7
  CDS (1)..(1476): transl_table=11
atggagcctagcgtgagcacaccagtctatcaaaattttattaatggccattttcttgctaatcaaagcggtgaaacttttgatgtaactaatcctgcaacaggtgaagttatttacagtgttgaagttgccgatgaatttgttcaaagcgcagccattgaaagtgcaaagcaaggttttgcacagtggtctaaaatgacacctattgaacgcagccgtattttattaaacgctgtggcaatacttcgcgaacgtaacgatgagcttgccctaatagaagtgcttgataccggtaagccaatgcaagaagcaaactgtgttgatatagaaaccggcgccgatgtaattgaatactttgcaggcctagcacctgcgcaagttggccaacaacaaatggtaggcgaagacttttactatacacgtaaagagccattaggaatttgtgccggtattggtgcatggaactacccgctacaaatagcatgttggaaatcaggcccagcccttgctgctggcaacgcatttatatttaaaccatctgaagaaacaccactaggtgctattaaacttgccgaaatttttgtagaagcgggcgtacctgctggcgtatttaacgttgtacaaggtgcgggtgatgtagggcaatggttaactgcacatagtgagattgacaaagtgtcgttcactggcgaagtaggcacaggtaaaaaagtagtcgcaagtgcttcaggcacattaaaagacgtaaccatggagcttggcggaaagtccccgcttgttgtgtttgatgatgcaaatatagagcaagcagtaagcgcagccatgttaggtaacttttatacccaaggcgaaatttgcactaactgtacacgtatttacgttcataaaaatatataccagcaatttattgatgagcttaaaacgcgaacagagaaaaatattattgcgggcgacccgcaagatttaaacactaactttggtgcgcttatctctaaaaagcatcaagacttagtaatgagttatgtcaataaagggattgaagaaggcgcaacactgcttaccggtgggtcaacgctttcacctgaatcagcgcctaatggttactttgttgcacctaccgtgttcattgattgcaacgatgaaatgacgattgttaaagaagaaatattcggcccagtaatgagcgtactcgtttttgaagacgaagacgatgtaattgcacgggctaatggtactcatctaggcctagctgcaggcgtgtttactagcgatattaaacgcgcacaccgtgttattcatcaattagaagcgggtatttgttggattaatgcctatggtaactcacctgctgaaatgcctgttggtggttataagcaatctggtattggccgtgaaaatggcatagaaacacttgatcattacacgcaaaccaagtctatttatgttggtatggccgacatagaaagcccattttaa

SEQ ID NO: 314 - protein, 491 aa, Alteromonadales bacterium TW-7
MEPSVSTPVYQNFINGHFLANQSGETFDVTNPATGEVIYSVEVADEFVQSAAIESAKQGFAQWSKMTPIERSRILLNAVAILRERNDELALIEVLDTGKPMQEANCVDIETGADVIEYFAGLAPAQVGQQQMVGEDFYYTRKEPLGICAGIGAWNYPLQIACWKSGPALAAGNAFIFKPSEETPLGAIKLAEIFVEAGVPAGVFNVVQGAGDVGQWLTAHSEIDKVSFTGEVGTGKKVVASASGTLKDVTMELGGKSPLVVFDDANIEQAVSAAMLGNFYTQGEICTNCTRIYVHKNIYQQFIDELKTRTEKNIIAGDPQDLNTNFGALISKKHQDLVMSYVNKGIEEGATLLTGGSTLSPESAPNGYFVAPTVFIDCNDEMTIVKEEIFGPVMSVLVFEDEDDVIARANGTHLGLAAGVFTSDIKRAHRVIHQLEAGICWINAYGNSPAEMPVGGYKQSGIGRENGIETLDHYTQTKSIYVGMADIESPF

SEQ ID NO: 315 - DNA, 1473 bp, Escherichia coli B
  CDS (1)..(1473): transl_table=11
atgtcccgaatggcagaacagcagctttatatacatggtggttatacctccgccaccagcggtcgcaccttcgagaccattaacccggccaacggtaacgtgctggcgaccgtgcaggccgccgggcgcgaggatgtcgatcgcgccgtgaaaagcgcccagcaggggcaaaaaatctgggcgtcgatgaccgccatggagcgctcgcgtattctgcgtcgggccgttgatattctgcgtgaacgcaatgacgaactcgcaaaactggaaaccctcgacaccggaaaagcatattcggaaacctcaaccgtcgatatcgttaccggtgcggacgtgctggagtactacgccgggctgatcccggcgttggaaggcagccagatcccgttgcgtgaaacgtcctttgtgtatacccgccgcgaaccgctgggcgtagtggcagggattggcgcatggaactacccgatccagattgccctgtggaaatccgccccggcgctggcggcaggcaacgcaatgattttcaaaccgagcgaagttaccccgcttaccgcgttaaagctggctgaaatttacagcgaagcgggcctgccgaacggcgtatttaacgtgttgccgggcgtgggcgcggagaccgggcaatatctgaccgagcatccgggcattgccaaagtgtcatttaccggcggtgtcgccagcggcaaaaaagtgatggctaactcggcggcctcttccctgaaagaagtgaccatggaactgggcggtaaatcaccgctgatcgttttcgatgatgcggatctcgatctcgccgccgatatcgccatgatggcaaacttcttcagctccggtcaggtgtgtaccaatggcacccgcgtcttcgttccggcgaaatgcaaagccgcatttgagcagaaaattctggcgcgcgttgagcgcattcgcgcgggcgacgttttcgatccgcaaactaacttcggcccgctggtcagcttcccgcatcgcgataacgtgctgcgctatatcgccaaaggcaaagaggaaggcgcgcgcgtactgtgcggcggcgatgtactgaaaggcgatggcttcgataacggcgcatgggttgcaccgacagtgttcaccgattgcagcgacgatatgaccatcgtgcgtgaagagatcttcgggccagtgatgtccattctgacctacgagtcggaagacgaagtcattcgccgcgctaacgataccgactacggcctggcagcgggcatcgtgacagcggacctgaaccgcgcgcatcgcgtcattcatcagctggaagcgggtatttgctggatcaacacctggggcgaatccccggcagagatgcccgttggcggctacaaacactccggcattggtcgcgagaacggcatgatgacgctccagagttacacccaggtgaagtccatccaggttgagatggctaaattccagtccatattctaa

SEQ ID NO: 316 - protein, 490 aa, Escherichia coli B
MSRMAEQQLYIHGGYTSATSGRTFETINPANGNVLATVQAAGREDVDRAVKSAQQGQKIWASMTAMERSRILRRAVDILRERNDELAKLETLDTGKAYSETSTVDIVTGADVLEYYAGLIPALEGSQIPLRETSFVYTRREPLGVVAGIGAWNYPIQIALWKSAPALAAGNAMIFKPSEVTPLTALKLAEIYSEAGLPNGVFNVLPGVGAETGQYLTEHPGIAKVSFTGGVASGKKVMANSAASSLKEVTMELGGKSPLIVFDDADLDLAADIAMMANFFSSGQVCTNGTRVFVPAKCKAAFEQKILARVERIRAGDVFDPQTNFGPLVSFPHRDNVLRYIAKGKEEGARVLCGGDVLKGDGFDNGAWVAPTVFTDCSDDMTIVREEIFGPVMSILTYESEDEVIRRANDTDYGLAAGIVTADLNRAHRVIHQLEAGICWINTWGESPAEMPVGGYKHSGIGRENGMMTLQSYTQVKSIQVEMAKFQSIF

SEQ ID NO: 317 - DNA, 1473 bp, Pseudomonas putida GB-1
  CDS (1)..(1473): transl_table=11
atggcccgtttcggaacgcaaaaactctacattgatggcgcttacgtcgacgctggcagcgatgccactttcgaagccatcaacccggccactggcgaagtcctcgcccacgtacagcgtgccaccgaggccgacgtcgagaaggccgtggaaagcgccgagcgtggccagaaggtctgggctgcgatgaccgccatgcagcgctcgcgcatcctgcgccgcgctgtcgacatcctgcgcgagcgcaacgatgaactggctcagctggaaaccctggacaccggcaagtcgtactccgaaacccgctacgtcgacatcgttaccggcgccgatgtgctggaatactacgcaggcctggtaccggccatcgaaggcgagcagatcccgctgcgcgaatcgtcctttgtctacacccgccgcgagccgctgggcgtgaccgtgggtatcggcgcctggaactacccgatccagatcgccctgtggaaatccgccccggccctggccgctggcaacgcgatgatcttcaagccgtcggaagtcacctcgctgaccaccctgaaactggccgagatctacaccgaagccggcctgccgaatggcgtgttcaacgtgctgaccggcagtggccgcgaagtcggtacctggctgaccgagcacccacgcatcgaaaaagtgtccttcaccggcggcaccaccaccggcaagaaagtcatggccagcgcctccagctcctcgctgaaggaagtcaccatggaactgggcggcaaatcgccactgatcatctgcgccgacgccgacctggacaaggccgccgacatcgccatgatggccaacttctacagctcgggccaggtgtgcaccaacggcacccgcgtgttcatcccagctgaaatgaaggctgccttcgaagccaagatcgccgagcgcgttgcccgcattcgcgttggcaacccggaagacgaaaacaccaacttcggcccgctggtcagcttcgcgcacatggaaaacgtgctgagctacatcgccaagggcaaagaagaaggtgcccgcgtcctgtgcggcggcgagcgtctgaccgaaggcgaattcgccaagggcgccttcgtggccccgaccgtgttcaccgattgcagcgacgacatgaccatcgtcaaggaagagatcttcggcccggtcatgagcattctgtcctacgagaccgaagaagaagtgatccgtcgcgccaacgacaccgagtacggcctggctgccggtgtgtgcaccaacgacatcacccgcgcccaccgcatcatccacaagctcgaagccggtatctgctggatcaacgcctggggtgaatcgccggccgaaatgccggtcggtggctacaagcagtcgggcgttggccgtgagaacggcgtcagctcgctggctcaatacactcgcatcaagtcggtccaggttgagctgggcggctacaactcggttttctaa

SEQ ID NO: 318 - protein, 490 aa, Pseudomonas putida GB-1
MARFGTQKLYIDGAYVDAGSDATFEAINPATGEVLAHVQRATEADVEKAVESAERGQKVWAAMTAMQRSRILRRAVDILRERNDELAQLETLDTGKSYSETRYVDIVTGADVLEYYAGLVPAIEGEQIPLRESSFVYTRREPLGVTVGIGAWNYPIQIALWKSAPALAAGNAMIFKPSEVTSLTTLKLAEIYTEAGLPNGVFNVLTGSGREVGTWLTEHPRIEKVSFTGGTTTGKKVMASASSSSLKEVTMELGGKSPLIICADADLDKAADIAMMANFYSSGQVCTNGTRVFIPAEMKAAFEAKIAERVARIRVGNPEDENTNFGPLVSFAHMENVLSYIAKGKEEGARVLCGGERLTEGEFAKGAFVAPTVFTDCSDDMTIVKEEIFGPVMSILSYETEEEVIRRANDTEYGLAAGVCTNDITRAHRIIHKLEAGICWINAWGESPAEMPVGGYKQSGVGRENGVSSLAQYTRIKSVQVELGGYNSVF

SEQ ID NO: 319 - DNA, 1491 bp, Pseudomonas putida GB-1
  CDS (1)..(1491): transl_table=11
atgccgcaactcagagatgccgtctattggcgtggacgaagcaccgacctggtggtggaggcgcgtgcgttcatcgccggtgcctatgtgggggccagcgaaggcgagacgtttgctgtgtgcagcccgattgatggccgcgagctggcgcaggttgcgttgtgccgtgggactgacgtagaacgcgccgtggctgccgcccgcggggcattcgagcgcggtggctgggccgacctggtaccacgccagcgcaaggccgttctgctgcgctgggctgcgttgatgagggagcacgccgaggagctggcgctgctggaaaccctggacactggcaaacccatcgccgataccacggcggtggatattcccagttccatctactgcctggaatggttcgccgagctggtcgacaaggtcaccggcgaggtgcccgcctgcgatccgcagttcctcggcaccgtgacccgcgagccggtcggcgtggtggcggcaatagtgccctggaactacccgctgctgatggcgacctggaagttcgccccagccctggccgccggcaacagcctaatcctcaagccttcggagaagagcccgctgagcgccttgcgcattgccggccttgcccgcgcggcgggtattcccgagggcgttttcaacgtggtgccgggcgatggcgagaccggtcgcctgctcagcctgcacccgcagatcgactgcctggccttcaccggctccggcgctgttggccggcagatcagccgcaatgcggcggacagcaatctcaagcgcgtctggctggagctgggcggcaaatcggcgaacatcgtcatggccgactgcccggacctgcgccgtgcggctgaggctgccgcggctgcggtgttcagcaacatgggccaggtgtgcagcgcaggttcgcgcctgttggtgcaacgccctatcgccggggccttcatcgccgaactgctggaggccgcgcgcgcctacctgcccggcgacccgttggacccgaccagcgtcaccggcagcctgatcgatgaagcccagtaccagcgtgtacgccaatacatcgagctgggcaagcgtgaagcgcgcctgctgctggggggcgaggactgcgcggcggtccccggcggccactatctgcaaccgaccatcttcgccactgacgccacctcgcgcatcgcccgcgaagaggtcttcgggccggtgctgagcgtcatcgaattcgatgggctggacgacgccatcgctgtcgccaatgccagcgaatacggcctggcggcggccttctggtcggccgacctcggcgccatccgccgtgcctcgcgacgcctgcgtgccggcaccgtgtgggtgaactgctacgacgagctgctcgacatgaacttcccgttcggtggcttcaaggagtccggcaatggccgggacaactccgtgcacgccctggacaagtacagcgaactcaagtcgaccatcatccgctgctga

SEQ ID NO: 320 - protein, 496 aa, Pseudomonas putida GB-1
MPQLRDAVYWRGRSTDLVVEARAFIAGAYVGASEGETFAVCSPIDGRELAQVALCRGTDVERAVAAARGAFERGGWADLVPRQRKAVLLRWAALMREHAEELALLETLDTGKPIADTTAVDIPSSIYCLEWFAELVDKVTGEVPACDPQFLGTVTREPVGVVAAIVPWNYPLLMATWKFAPALAAGNSLILKPSEKSPLSALRIAGLARAAGIPEGVFNVVPGDGETGRLLSLHPQIDCLAFTGSGAVGRQISRNAADSNLKRVWLELGGKSANIVMADCPDLRRAAEAAAAAVFSNMGQVCSAGSRLLVQRPIAGAFIAELLEAARAYLPGDPLDPTSVTGSLIDEAQYQRVRQYIELGKREARLLLGGEDCAAVPGGHYLQPTIFATDATSRIAREEVFGPVLSVIEFDGLDDAIAVANASEYGLAAAFWSADLGAIRRASRRLRAGTVWVNCYDELLDMNFPFGGFKESGNGRDNSVHALDKYSELKSTIIRC

SEQ ID NO: 321 - DNA, 1560 bp, Bacillus amyloliquefaciens
  CDS (1)..(1560): transl_table=11
atgcgcttacttcgcgcggacatcaagatgctcaaaacagaccataaaaaaatttcgggaggtttgttacgaatgagttctttaacgatgcagatcacaaaaaggctggaaacatttttacagggtacgaagaaactttatattgacggaaaatttgttccgagcacttcaggatcaacatttgtcacaccgaatccggcaaccggagaaacgctgatgacgctttacgaggcacagtcagaagacattgacagtgcagtgaaagcggcacgcaaagcctttgatcacggcgaatggcgcactatgccggccgcttccagaagcaggctgatgtataagcttgccgatttaatggaagagcacaaaacggaactcgcgcagcttgaaacacttgataacggaaaaccgattaatgaaacaacaaatggggatatcccgctcgcaattgagcatatgcgttattatgccgggtggtctacaaagataaccggacaaacgattccggtcgccggctcatattttaattacacccgccatgagcctgtcggcgtcgtggggcagatcatcccttggaacttcccgctccttatggcgatgtggaaaatgggcgccgcccttgccacaggctgcacaatcgttttgaaaccggcggaacagacaccgctgaccgccctctatttagcggagttaatagatcaggcgggcttccctgacggcgtcatcaatattgtcccagggttcggcgagacggccggggaagcgctgaccaaccatgacgatgtcgataaactcgcttttaccggttctacagaaatcggcaaaaaaatcatggaaaaagccgcaaaaaaaattaaacgcgtgacactggagcttggcggaaagtcacctaacatcattttgcctgacgccaatttgaagaaagccattcccggcgctttaaacggggtcatgtttaatcaggggcaggtatgctgcgcaggctcccgtgtcttcattcacaaagacaaatatgatgaggtcgtcagcgaaatggtttcatatgcgaaatcgcttcagcaaggcgccggccttcaccaagatacacaaatcggcccgctcgtcagtcaggaacagcatgagcgcgtgctttcatatattgaaaaaggaaaagcggaaggagccaaagctgtcgcgggcggcagctgcccgtttgaagaagggtattttgtctccccgactgtatttgcggatgtggatgacagcatgaccatcgcaaaagaagaaattttcggccctgttttagccgccattccgtatgatacggtagatgaagtcattgagcgggcgaaccgctcggaatacggccttgcagccggactttggactgagaatgtgaaaaacgcccattacattgctgaccgtctccaagccggcaccgtttgggtcaactgctacaatgttttcgatgcggcatctcctttcggcggctataagcaatccggcctcgggcgggaaatgggctcttacgcgctgaataattatacagaagtgaaaagcgtctggatcaatctggaagattaa

SEQ ID NO: 322 - protein, 519 aa, Bacillus amyloliquefaciens
MRLLRADIKMLKTDHKKISGGLLRMSSLTMQITKRLETFLQGTKKLYIDGKFVPSTSGSTFVTPNPATGETLMTLYEAQSEDIDSAVKAARKAFDHGEWRTMPAASRSRLMYKLADLMEEHKTELAQLETLDNGKPINETTNGDIPLAIEHMRYYAGWSTKITGQTIPVAGSYFNYTRHEPVGVVGQIIPWNFPLLMAMWKMGAALATGCTIVLKPAEQTPLTALYLAELIDQAGFPDGVINIVPGFGETAGEALTNHDDVDKLAFTGSTEIGKKIMEKAAKKIKRVTLELGGKSPNIILPDANLKKAIPGALNGVMFNQGQVCCAGSRVFIHKDKYDEVVSEMVSYAKSLQQGAGLHQDTQIGPLVSQEQHERVLSYIEKGKAEGAKAVAGGSCPFEEGYFVSPTVFADVDDSMTIAKEEIFGPVLAAIPYDTVDEVIERANRSEYGLAAGLWTENVKNAHYIADRLQAGTVWVNCYNVFDAASPFGGYKQSGLGREMGSYALNNYTEVKSVWINLED

SEQ ID NO: 323 - DNA, 1503 bp, Amaranthus hypochondriacus
  CDS (1)..(1503)
atggcgatccgtgtaccttcgcgccagctattcattgatggagaatggagggaacccatcaagaaaaatcgcatccctatcatcaatccttctactgaggagatcattggtgttattccggctgctactgctgaagatgtggagcttgcagtcgctgcagctagaagagcgcttaagaggaacaaaggagaagattgggcgtctgcatctggagctcatcgtgctaagtaccttcgggccattgctgctaaaataacagagaaaaaagattattttgcaaaacttgaagccatggattgtgggaaaccactggatgaagcagcatgggacattgatgatgttgctggatgttttgaatattatgccgatcaagcagaagcccttgatgctaaacaaaaggctccaattgcccttcctatggacactttcaaatgccatgtgcttaaacaacccattggtgttgttgggttgatttctccttggaattatccgcttctaatggcaacatggaaagttgctccagctcttgctgctggttgctcagctgtacttaagccgtctgaactggcatccgtaacttgcctagaattggctgaagtgtgcagagaagtgggactgcctcctggcgtattaaatattttaacaggattaggtcctgaagctggtgggccgttagcttgccatcctgatgttgacaaggttgcatttactgggagtacagctactggtagcaaggttatgtcatccgctgctcaattggtcaagcctgttacattagaacttggagggaaaagtcctattgttatctttgaagatgttgacttggataaagctgctgaatggactgcttttggctgtttttggacaaatggtcaaatttgcagtgcaacatcgagattacttgtgcatgaaagcatcgcagctgaatttttggataggcttgtaaaatggtgcaaaaacataaagatctctgacccgtttgaggaaggctgtcgacttggtcctgttgtgagtaagagtcagtatgaaaaagttttgaagttcatttcaacagcaaagagtgagggtgcaactattttgtgtggaggttcccgtcccgagcatttgaagaaagggtattatgttgaaccaacaattataagtgatgtctccacttccatgcaaatatggagggaagaagttttcggcccagtcttatgtgtcaaaacctttggttctgaagatgaagccattgaactggctaatgatactcagtatggtttaggggctgctgtgttatcgaaagatcttgatcggtgtgagagaataacaaaggcattgcaagctggaattgtgtgggttaactgctcacaaccatgcttttgccaagctccatggggaggcacgaagcgtagcggttttggacgtgaactcggggaatggggtatcgagaattacttgaatatcaaacaagtgactgaatatatttccgatgaaccatggggatggtacaagtctccttga

SEQ ID NO: 324 - protein, 500 aa, Amaranthus hypochondriacus
MAIRVPSRQLFIDGEWREPIKKNRIPIINPSTEEIIGVIPAATAEDVELAVAAARRALKRNKGEDWASASGAHRAKYLRAIAAKITEKKDYFAKLEAMDCGKPLDEAAWDIDDVAGCFEYYADQAEALDAKQKAPIALPMDTFKCHVLKQPIGVVGLISPWNYPLLMATWKVAPALAAGCSAVLKPSELASVTCLELAEVCREVGLPPGVLNILTGLGPEAGGPLACHPDVDKVAFTGSTATGSKVMSSAAQLVKPVTLELGGKSPIVIFEDVDLDKAAEWTAFGCFWTNGQICSATSRLLVHESIAAEFLDRLVKWCKNIKISDPFEEGCRLGPVVSKSQYEKVLKFISTAKSEGATILCGGSRPEHLKKGYYVEPTIISDVSTSMQIWREEVFGPVLCVKTFGSEDEAIELANDTQYGLGAAVLSKDLDRCERITKALQAGIVWVNCSQPCFCQAPWGGTKRSGFGRELGEWGIENYLNIKQVTEYISDEPWGWYKSP

SEQ ID NO: 325 - DNA, 1864 bp, Oryza sativa
  CDS (105)..(1703)
ctcgtgccgaattcggcacgagctccaccactccactccccaatccaaccaccccccgaacaaccggagaagagaggctgcactccactcgccgccggcgaccgatgctccgcgccgccctcctccgctcaggctccggcctccgccggcctcccatggccgcgccgctctccaccgccgccgccgcctcgtggctctccgacagcgcctcgtctccgcctagggtgcgcctcctcatcggcggggagttcgtcgagtcgcgggccgacgagcacgtcgacgtcaccaatccggcgacgcaggaagtggtgtcgcggatcccgctcaccaccgccgacgaattcagggccgccgtggacgccgccaggaccgccttccccgggtggcggaacacgccggtgaccacgcggcagcgcatcatgctcaagttccaggagctcatccgggccaacatggataaactggcagagaacattacaaccgaacaggggaagactgaaggatgcttggggcgatgtttccgtgggctagaagtggtggaacatgcttgtggaatggggacactgcagatgggtgaatatgtatcaaatgtttctaacgggattgacacctttagcattagggagccacttggtgtatgtgctggaatatgtccattcaattttccagctatgatccccctatggatgttcccaatagcggtcacttgtggcaatacttttgttctaaagccatcagaaaaagatccaggggctgctatgatgcttgcggagctagcaatggaggctggtttaccaaagggtgtgttgaacattgttcatggtacccatgatgttgtgaacaacatttgtgatgacgaagacatccaggcagtttcctttgttggttccaatatagctggtatgcatatatattctagagcatcggcaaaggggaagcgtgttcagtctaatatgggtgcaaagaatcatgcaattatccttcctgatgctgaccgagatgccacactgaatgcccttattgctgctggttttggtgctgccgggcaaaggtgtatggcattgagcactgctgtttttgttggaggttcagagccatgggaggatgagctagtcaaacgtgcaagcagccttgtggttaattcaggaatggctagtgatgcagaccttggtccagtgatcagcaaacaggctaaggaacgtatctgcaaattaatacaaagtggtgctgataatggtgctcgtgtgctgcttgatggaagagatattgtggttcctaacttcgagaatggtaattttgttggtccaacactccttgctgatgttaaaagtgaaatggaatgttacaaggaggagatttttggtccagttctcttgatgaaggctgagagcctaaatgatgctatccaaattgtgaacagaaacaaatatggcaatggagcatccatatttacaacatctggtgtgtctgcaaggaaatttcaaacagacattgaagctggccaggtgggcatcaacgtgccgattccagaacccctgccgttcttctcctttaccggcagcaaagcttcctttgcaggagacttgaatttctacggcaaggcgggcgtgcagttcttcacccagatcaagacggtcacgcagcagtggaaggagtcgccggctcagcgcgtctccctctccatgcccacctcgcagaagtgaggtgaaaaaaaagaaaggcatcttgtacgttcttcatttgcccatccatggaaatagacacatgcaccaatgcgaaatgaacagaagaataatcgataggcgcgggatgccatgccatgccaataaaggtagctggtcttgttaaaaaaaaaaaaaaaaaa

SEQ ID NO: 326 - protein, 532 aa, Oryza sativa
MLRAALLRSGSGLRRPPMAAPLSTAAAASWLSDSASSPPRVRLLIGGEFVESRADEHVDVTNPATQEVVSRIPLTTADEFRAAVDAARTAFPGWRNTPVTTRQRIMLKFQELIRANMDKLAENITTEQGKTEGCLGRCFRGLEVVEHACGMGTLQMGEYVSNVSNGIDTFSIREPLGVCAGICPFNFPAMIPLWMFPIAVTCGNTFVLKPSEKDPGAAMMLAELAMEAGLPKGVLNIVHGTHDVVNNICDDEDIQAVSFVGSNIAGMHIYSRASAKGKRVQSNMGAKNHAIILPDADRDATLNALIAAGFGAAGQRCMALSTAVFVGGSEPWEDELVKRASSLVVNSGMASDADLGPVISKQAKERICKLIQSGADNGARVLLDGRDIVVPNFENGNFVGPTLLADVKSEMECYKEEIFGPVLLMKAESLNDAIQIVNRNKYGNGASIFTTSGVSARKFQTDIEAGQVGINVPIPEPLPFFSFTGSKASFAGDLNFYGKAGVQFFTQIKTVTQQWKESPAQRVSLSMPTSQK

SEQ ID NO: 327 - DNA, 2071 bp, Nicotiana tabacum
  CDS (55)..(1683)
ggttcttcaattcattacagtgagaaactttcatttgctctactgttcatattaatggcggctcgtgtgtttacctctcgtctctctcgctctttgacatcctcttctcatctgctctcaagaggtttgatcattgtggataagcaaaaatcccatctgggcagaatagctgcttatcaatacagcacggcggctgctattgaggaaccgatcaaaccagctgtcaatgtggaacatactaaactttttatcaatggccaatttgttgatgctgcatcaggaaaaacattccctacccttgaccccaggacaggggaggtaattgcacatgttgctgaaggtgatgcagaagatattaatcgggcagtagctgctgctcgtaaggcttttgacgaaggaccatggcctaaaatgaatgcttatgaaaggtcaaagatattcgtacgccttgctgatctgattgaaaaacataacgatcaaattgcaacgctcgagacttgggatactgggaagccgtatgaacaggctgctaagattgaagtaccaatggttgtacgtctactccgttattatgctggctgggcagataaaattcatggtatgactattcctgcagatggaccatatcatgttcagacattgcacgaaccaattggggttgctggtcagattatcccatggaactttcctcttctcatgttttcttggaagattggacctgctttagcttgtgggaacactgtcgtgctaaagacagctgagcagacaccattatctgcattctacgtagcacatctgttacaggaggctgggctgcctgaaggtgttttgaacatcatttctggttttggtccaacagctggtgctcctctttgtagtcatatggatgtcgataagcttgcttttactggatcgacagatacaggaaaagctatactttcactggctgctaagagcaatcttaagccggtgactttggaacttggagggaaatccccttttattgtttgtgaggatgctgatattgatacggccgttgaacaagctcactttgctctcttctttaatcaggggcaatgttgctgtgctggatctcggacttttgttcacgagaaagtttatgatgaatttcttgagaaggcaaaggcacgtgccttgaaacgaacagttggtgatccgtttaaatcaggcactgagcagggtcctcagattgattcaaaacagtttgataagatcatgaattacattagatctggtatcgatagtggagcaactcttgaaactggaggtgagcgacttggtgaacggggatactatattaagcccacagttttctctaacgttaaggacgatatgctgattgcacaagatgaaatatttggtccagtgcagtccatcttaaaatttaaggatgttgatgatgtgatacggagagctaataacagtcggtatggtctagctgctggagtatttacacagaacattgacactgcaaacacattgacacgagccttgagagttggaacggtatgggttaattgctttgataccttcgatgctacaattccttttggtgggtataaaatgagtggacacggaagagaaaagggagaatacagtctcaagaattacttgcaagtaaaggcagttgtgaccccattgaagaatcctgcatggttataaacatgatcctcctcagcaatttttacaaataaaactatatcaagttgctttattttatgatgctgatgacgattaagtgttggttttctttaaaacttgctactataagcaaactgcaattaattttaacaggcagcagggtttattgaaagctgccaaattgccaaatttgccatcctttccataccctttttttaagattagtcttcttgttttttctactcctctgcaaggagttgttctctttttaaatttttattgctcaaaatatgctgcctccgaatagtttgggagtgaggcatgattgttggttgtattcatttgtttaaaatataaagactagaacaaaaagaaacactaaggaattctatgtttactattatgtttt

SEQ ID NO: 328 - protein, 542 aa, Nicotiana tabacum
MAARVFTSRLSRSLTSSSHLLSRGLIIVDKQKSHLGRIAAYQYSTAAAIEEPIKPAVNVEHTKLFINGQFVDAASGKTFPTLDPRTGEVIAHVAEGDAEDINRAVAAARKAFDEGPWPKMNAYERSKIFVRLADLIEKHNDQIATLETWDTGKPYEQAAKIEVPMVVRLLRYYAGWADKIHGMTIPADGPYHVQTLHEPIGVAGQIIPWNFPLLMFSWKIGPALACGNTVVLKTAEQTPLSAFYVAHLLQEAGLPEGVLNIISGFGPTAGAPLCSHMDVDKLAFTGSTDTGKAILSLAAKSNLKPVTLELGGKSPFIVCEDADIDTAVEQAHFALFFNQGQCCCAGSRTFVHEKVYDEFLEKAKARALKRTVGDPFKSGTEQGPQIDSKQFDKIMNYIRSGIDSGATLETGGERLGERGYYIKPTVFSNVKDDMLIAQDEIFGPVQSILKFKDVDDVIRRANNSRYGLAAGVFTQNIDTANTLTRALRVGTVWVNCFDTFDATIPFGGYKMSGHGREKGEYSLKNYLQVKAVVTPLKNPAWL

SEQ ID NO: 329 - DNA, 1503 bp, Kalidium foliatum
  CDS (1)..(1503)
atggcgttccctataccttctcgtcagctattcattgatggagaatggacagaaccaatcaagaaaaatcgtattcctatcatcaaccctgctactgaagagatcattggtgatattcctgctgccactgctgaggatgtggagcttgcagtggctgcagctagaagagcccttaagaggaataagggggaagattgggcatctgcatctggagctcatcgtgctaagtacttacgtgctatcgctgccaagataatggaaagaaaaggtcaaatttcaaagcttgaagccatggattctgggaaaccactggatgaaacagaatgggacattgacgatgttgctgggtgttttgaatactatgccgagcaagcagaagctcttgatgctaaacaaaaggctccaatttcccttcctatggatacattcaagtgccatgtgctcaggcagccaattggcgttgttggtttgatttctccatggaattatccacttctaatggctacatggaaagttgctccagctcttgctgctagctgtgcaactatacttaaaccttcagaaacggcttctgtgacttgtctagagttggctgatgtgtgcagagaagtgggactgccacctggtgtgctgaatatattgacaggattgggtccagaagctggtgccccattagcatgtcatcctgacgttgataaggttgcatttactgggagtaccgcaacgggtagcaaaattatgtcttctgctgcccaaatggtcaagcctgttacattagaacttggagggaaaagtcctattctcgtgtttgaagatgttgatttggataaagctgctgaatgggctgcttttggctgtttttggacaaatggccagatttgcagtgcaacgtctagattacttgtgcatgaaagcattgcagctgactttttggatagacttctaaaatggtgcaaaaacataaaggtttctgatccatttgaagacggctgcaggcttggtcctgttatcagcaaggcacagtacgagaaagttctgaaattcatttcaacagcaaagagcgagggtgcaactgtcttgtgtgggggatcccgccctgagcatctgaagaaaggatattttattgaaccaacaattattagtgatgtctccacatctatgcaaatatggaaagaggaagttttcggtcctgtcttatgtgttaaaacatttcgttctgatgatgaggccgttgagctagcaaatgactcccagtatggtttaggttctgctgtgctatccaaaaatcttgaaaggtgtgagaaagtgacaaaggagttgcaagctggaattgtttgggttaactgcccacaaccatgcttttgccaagctccatggggaggcagcaagcgtagtggttttggacgcgagcttggagaatggggtctcgagaattacttgaatatcaaacaagtgaccgagtatatctccgatgagccatggggttggtacaagtctccttga

SEQ ID NO: 330 - protein, 500 aa, Kalidium foliatum
MAFPIPSRQLFIDGEWTEPIKKNRIPIINPATEEIIGDIPAATAEDVELAVAAARRALKRNKGEDWASASGAHRAKYLRAIAAKIMERKGQISKLEAMDSGKPLDETEWDIDDVAGCFEYYAEQAEALDAKQKAPISLPMDTFKCHVLRQPIGVVGLISPWNYPLLMATWKVAPALAASCATILKPSETASVTCLELADVCREVGLPPGVLNILTGLGPEAGAPLACHPDVDKVAFTGSTATGSKIMSSAAQMVKPVTLELGGKSPILVFEDVDLDKAAEWAAFGCFWTNGQICSATSRLLVHESIAADFLDRLLKWCKNIKVSDPFEDGCRLGPVISKAQYEKVLKFISTAKSEGATVLCGGSRPEHLKKGYFIEPTIISDVSTSMQIWKEEVFGPVLCVKTFRSDDEAVELANDSQYGLGSAVLSKNLERCEKVTKELQAGIVWVNCPQPCFCQAPWGGSKRSGFGRELGEWGLENYLNIKQVTEYISDEPWGWYKSP

SEQ ID NO: 331 - DNA, 1618 bp, Beauveria bassiana
  CDS (1)..(1494)
atgactttgacagtgcagctatctacgcccgctacgggcaaatatgaccagccaattggcctgtttatcaacaacgagtgggttgagggtgtcgataagaaaaagtttgaagtcatcaacccctctaccgaggaggtcatcacctctgtctgcgaagctaccgagaaggatgtcgacctcgccgtcgccgccgcccgcaaggccttcgaaaccacttggaaggaaacgaccccggcggaacgcggcgtgttgatgaacaaactcgccgacattgccgagaagaacaccgacctcctcgccgctgtcgagtctctcgacaatggcaagtccatcaccatggccaagggcgatgttggcgcagtcgtcgcctgcatccgctactatgccggctggtccgacaagatccacggcaaaactgtcgacgtcgcccccgacatgcaccactacgtcacgaaggagcctattggtgtctgcggtcagatcattccctggaacttccctcttctcatgctttcctggaagattggccctgccctggccactggcaacaccatcgtcatgaagactactgagcagactcccctctctgccctcgtctttgcccaatttgtcaaggaagctggcttccctcctggtgttttcaacttgatctctggtttcggcaagaccgccggtgccgccctctccgctcacatggacgtagacaagatcgctttcaccggttccaccctcatcggccgcaccatcctcaaagctgctgcattctccaacctcaagaaggtcactcttgagctcggtggcaagtcccccaacatcgtcttcaatgatgccgatattgagtctgccatctcctgggtcaatttcggcatctactacaaccacggtcagtgctgctgtgctggtactcgcatctttgtccaggagggcatttacgacaagttcctcgaggctttcaaaaagcgcgctgccgccaacactgtcggtgacccctttgacaccaaaactttccagggtcctcaggtcagcaagctccagtacgaccgcatcatgagctacatccagtctggcaaggaagagggtgccactgtcgagatcggtggtgagcgtcacggcgacaagggcttcttcatcaagcccaccatcttctccaacgttcgctccgacatgaagattatgcaggaggagatcttcggccccgtctgctccatctccaagttctccaccgaggaggaggtcatcaagcttggcaacgagaccacctacggtctcgccgctgccgttcacaccaaggatctcaacaccagcattcgtgtcagcaacgccctcaaagctggtaccgtctgggtcaactgctacaaccttttgcacgcctcggttccctttggaggcttcaaagagtctggaatcggtcgtgaattgggtgaagcggccctcgataactatctacagacaaagtcagtcactgtccgtctgggaggcccaatgttcggatagaatcaaatttgtacctataaaaagcccagacaagctcttgggacatcaacacaaaaatttgaatctcgctagcctaataaattgacaacttatccatgaaaaaaaaaaaaaaaaaaaaaaaaaa

SEQ ID NO: 332 - protein, 497 aa, Beauveria bassiana
MTLTVQLSTPATGKYDQPIGLFINNEWVEGVDKKKFEVINPSTEEVITSVCEATEKDVDLAVAAARKAFETTWKETTPAERGVLMNKLADIAEKNTDLLAAVESLDNGKSITMAKGDVGAVVACIRYYAGWSDKIHGKTVDVAPDMHHYVTKEPIGVCGQIIPWNFPLLMLSWKIGPALATGNTIVMKTTEQTPLSALVFAQFVKEAGFPPGVFNLISGFGKTAGAALSAHMDVDKIAFTGSTLIGRTILKAAAFSNLKKVTLELGGKSPNIVFNDADIESAISWVNFGIYYNHGQCCCAGTRIFVQEGIYDKFLEAFKKRAAANTVGDPFDTKTFQGPQVSKLQYDRIMSYIQSGKEEGATVEIGGERHGDKGFFIKPTIFSNVRSDMKIMQEEIFGPVCSISKFSTEEEVIKLGNETTYGLAAAVHTKDLNTSIRVSNALKAGTVWVNCYNLLHASVPFGGFKESGIGRELGEAALDNYLQTKSVTVRLGGPMFG

SEQ ID NO: 333 - DNA, 1557 bp, Pichia angusta
  CDS (1)..(1557)
atgctcagaacctctcttagatctttggccaagccagcctccagagttagcctaagatactattcttcttacccgctgtccaccactgtgacgctgcctaacggaaagtcctatgagcagcctaccggtttgtttatcaacaacgagtttgttccttccaaacagcacaaaacgtttgaggtgatcaaccccgccaccgaggaggagatctgccacgtttacgaggccagaaaggaggacgtcgatgttgctgtcgacgccgcagagaaggccttcaagggttcttggagcaccgccgaccctgctattcgtggcaaggccctgtggaacctggccgagctgctcgaggctcacaaggataccctcgccgcaattgagtctctcgacaacggtaaggctctgcagctggcccagggtgacgtggcgctcgtgatcaactacatcagatcgtgcgctggctgggccgacaagctgaccggccagtacatcgacacgggcgatacccaccacacttacaccaagagagagcctattggagtgtgtggccagatcatcccatggaacttccctcttttgatgtggtcctggaaggttggtcctgctctggctgcaggtaacactgtggtgctgaagacggccgagagcacgccattgtctgccctgtacgcttcgcagctcgtcaaggaggccggaatcccagccggagtggtgaacatcgtgtccggattcggtaagatcacgggagatgccattgccagccaccctaagatcaagaagcttgccttcaccggctccaccgccactggaagacacatcatgaaggttgctgccgactccaacctcaagaaggtgaccctggagcttggaggaaagtctgccaacattgtgtttgacgacgctgacgtcaagaccgccatcagcgccctcgttgccggtatcttctacaactccggagaggtgtgctctgccggatccagagtgtttgtccaggagggtatttacgaggagatcctcagggaattcaaagctgctgcagagacgctcaaggtgggtgacccattcgatctgtccactttccaaggtgcccaaacttcccagatgcaattgaacaagattctcggctacgtcgacatcgcccaccaggaaggaggtagactcatcaccggaggtgagagactgggcaacaagggattcttcgtcaagccaacgatctttgccgacgtgaccccagacatgagagcatacaaggaggagatctttggaccatttgccgtgatcacgccattcaagaccgccgacgaggtgatcgagttggctaacgactccgaatacggacttgctgcaggtgtccacaccaagtcgctcgacaccgccacctacgtctccaacaagcttgaggccggctctgtctggatcaacacttacaacgacttccaccagatggtgccattcggaggatacaagcagtccggtattggccgtgaaatgggtgcccaggctctggacaactacacccagtggaaggctgtgagaattggtcttcagaagccaacttaa

SEQ ID NO: 334 - protein, 518 aa, Pichia angusta
MLRTSLRSLAKPASRVSLRYYSSYPLSTTVTLPNGKSYEQPTGLFINNEFVPSKQHKTFEVINPATEEEICHVYEARKEDVDVAVDAAEKAFKGSWSTADPAIRGKALWNLAELLEAHKDTLAAIESLDNGKALQLAQGDVALVINYIRSCAGWADKLTGQYIDTGDTHHTYTKREPIGVCGQIIPWNFPLLMWSWKVGPALAAGNTVVLKTAESTPLSALYASQLVKEAGIPAGVVNIVSGFGKITGDAIASHPKIKKLAFTGSTATGRHIMKVAADSNLKKVTLELGGKSANIVFDDADVKTAISALVAGIFYNSGEVCSAGSRVFVQEGIYEEILREFKAAAETLKVGDPFDLSTFQGAQTSQMQLNKILGYVDIAHQEGGRLITGGERLGNKGFFVKPTIFADVTPDMRAYKEEIFGPFAVITPFKTADEVIELANDSEYGLAAGVHTKSLDTATYVSNKLEAGSVWINTYNDFHQMVPFGGYKQSGIGREMGAQALDNYTQWKAVRIGLQKPT

SEQ ID NO: 335 - DNA, 1799 bp, Ophiopogon japonicus
  CDS (64)..(1566)
gccaacgtaagcctatcgttcccatacccgtccagttctacacaatttttataaataccaagaatggcgttcccaattcctgctcgtcaactcttcatcgatggagagtggagagaaccccttttaaaaaatcgcatacccatcatcaacccttctactgaagaaatcatcggtgatattcctgcagcaactgcagaggatgtggaggttgcagtggtggcagctagaaaagcctttaagaggaacaaaggcagagattgggctgcaacttctggtgctcatcgtgctaaatatttgcgtgctattgctgctaagataacagagaaaaaagatcattttgttaaactggaaacccttgattctggaaaaccacgggatgaagcagtgttagatattgatgatgttgctacatgctttgaatactttgccggtcaagcagaagctctggatgctaaacaaaaggctccagtcaccctgcctatggaaagatttaaaagtcatgttctcaggcagcccattggtgttgttggattaatatccccatggaattacccacttctaatggctacatggaaaattgctcccgcacttgctgctggatgcacagctgtacttaaaccatcagaattggcatctgtgacttgtctagaattcggtgaagtgtgtaatgaagtgggacttcctccaggtgtgttaaatattttgacaggattaggtcctgatgctggtgccccaatagtatctcatcctgatattgacaaggtagcatttactgggagtagtgccactggaagcaagattatggcttctgctgcccaactagttaagcctgttactttggagcttggaggtaaaagtcctgttatcatgtccgaagatattgatattgaaacagctgttgaatggactctttttggcgttttctggacaaatggtcaaatctgtagtgcaacatctagactgcttgtgcatgaaagcattgcagctgaatttgttgataggatggtgaagtggacaaaaaacataaaaatttctgatccatttgaagaaggatgccggcttggccccgttattagtaaaggacagtacgacaagattatgaagttcatatcgacagcgaagagtgaaggggcaacaattttgtgtggaggctcccgtcctgagcatttgaagaaagggtattatattgaacccaccattataactgatattaccacatccatgcaaatatggaaagaggaagtgtttggccctgtcatatgtgttaaaacatttaaaactgaagatgaagccattgaattggcaaatgatacagagtatggtttagctggtgccgtgttttctaaagatcttgaaagatgtgagagggtaactaaggctctagaagttggagctgtttgggttaattgctcacaaccatgctttgttcatgctccatggggaggagtcaagcgtagtggatttggacgtgaacttggggaatggggtatcgagaattacttgaatatcaagcaggtgacgagtgatatctctgatgaaccatggggatggtacaagtctccttgatccgatcaaattctactgtcaaatcaaatgctaccctcgggttaggttaccacaatgtaatgttgcacggttttatctgcgtgcagtgaagttatacagcggttagattgtaccctttgctggagctctattggtttcttacgcaattctgataattaaatgaacgttttgctaaaattatttttggaaattcgcgaaattcgctaatatcgcttggagaaaaaaaaaaaaaa

SEQ ID NO: 336 - protein, 500 aa, Ophiopogon japonicus
MAFPIPARQLFIDGEWREPLLKNRIPIINPSTEEIIGDIPAATAEDVEVAVVAARKAFKRNKGRDWAATSGAHRAKYLRAIAAKITEKKDHFVKLETLDSGKPRDEAVLDIDDVATCFEYFAGQAEALDAKQKAPVTLPMERFKSHVLRQPIGVVGLISPWNYPLLMATWKIAPALAAGCTAVLKPSELASVTCLEFGEVCNEVGLPPGVLNILTGLGPDAGAPIVSHPDIDKVAFTGSSATGSKIMASAAQLVKPVTLELGGKSPVIMSEDIDIETAVEWTLFGVFWTNGQICSATSRLLVHESIAAEFVDRMVKWTKNIKISDPFEEGCRLGPVISKGQYDKIMKFISTAKSEGATILCGGSRPEHLKKGYYIEPTIITDITTSMQIWKEEVFGPVICVKTFKTEDEAIELANDTEYGLAGAVFSKDLERCERVTKALEVGAVWVNCSQPCFVHAPWGGVKRSGFGRELGEWGIENYLNIKQVTSDISDEPWGWYKSP

SEQ ID NO: 337 - DNA, 1507 bp, Atriplex hortensis
  CDS (4)..(1506)
agaatggcgttcccaattcctgctcgtcaactcttcatcgatggagagtggagagaaccccttttaaaaaatcgcatacccatcatcaacccttctactgaagaaatcatcggtgatattcctgcagcaactgcagaggatgtggaggttgcagtggtggcagctagaaaagcctttaagaggaacaaaggcagagattgggctgcaacttctggtgctcatcgtgctaaatatttgcgtgctattgctgctaagataacagagaaaaaagatcattttgttaaactggaaacccttgattctggaaaaccacgggatgaagcagtgttagatattgatgatgttgctacatgctttgaatactttgccggtcaagcagaagctctggatgctaaacaaaaggctccagtcaccctgcctatggaaagatttaaaagtcatgttctcaggcagcccattggtgttgttggattaatatccccatggaattacccacttctaatggctacatggaaaattgctcccgcacttgctgctggatgcacagctgtacttaaaccatcagaattggcatctgtgacttgtctagaattcggtgaagtgtgtaatgaagtgggacttcctccaggtgtgttaaatattttgacaggattaggtcctgatgctggtgccccaatagtatctcatcctgatattgacaaggtagcatttactgggagtagtgccactggaagcaagattatggcttctgctgcccaactagttaagcctgttactttggagcttggaggtaaaagtcctgttatcatgttcgaagatattgatattgaaacagctgttgaatggactctttttggcgttttctggacaaatggtcaaatctgtagtgcaacatctagactgcttgtgcatgaaagcattgcagctgaatttgttgataggatggtgaagtggacaaaaaacataaaaatttctgatccatttgaagaaggatgccggcttggccccgttattagtaaaggacagtacgacaagattatgaagttcatatcaacagcgaagagtgaaggggcaacaattttgtgtggaggctcccgtcctgagcatttgaagaaagggtattatattgaacccaccattataactgatattaccacatccatgcaaatatggaaagaggaagtgtttggccctgtcatatgtgttaaaacatttaaaactgaagatgaagccattgaattggcaaatgatacagagtatggtttagctggtgccgtgttttctaaagatcttgaaagatgtgagagggtaactaaggctctagaagttggagctgtttgggttaattgctcacaaccatgctttgttcatgctccatggggaggagtcaagcgtagtggatttggacgtgaacttggggaatggggtatcgagaattacttgaatatcaagcaggtgacgagtgatatctctgatgaaccatggggatggtacaagtctccttgaa

SEQ ID NO: 338 - protein, 500 aa, Atriplex hortensis
MAFPIPARQLFIDGEWREPLLKNRIPIINPSTEEIIGDIPAATAEDVEVAVVAARKAFKRNKGRDWAATSGAHRAKYLRAIAAKITEKKDHFVKLETLDSGKPRDEAVLDIDDVATCFEYFAGQAEALDAKQKAPVTLPMERFKSHVLRQPIGVVGLISPWNYPLLMATWKIAPALAAGCTAVLKPSELASVTCLEFGEVCNEVGLPPGVLNILTGLGPDAGAPIVSHPDIDKVAFTGSSATGSKIMASAAQLVKPVTLELGGKSPVIMFEDIDIETAVEWTLFGVFWTNGQICSATSRLLVHESIAAEFVDRMVKWTKNIKISDPFEEGCRLGPVISKGQYDKIMKFISTAKSEGATILCGGSRPEHLKKGYYIEPTIITDITTSMQIWKEEVFGPVICVKTFKTEDEAIELANDTEYGLAGAVFSKDLERCERVTKALEVGAVWVNCSQPCFVHAPWGGVKRSGFGRELGEWGIENYLNIKQVTSDISDEPWGWYKSP

SEQ ID NO: 339 - DNA, 1961 bp, Vitis pseudoreticulata
  CDS (291)..(1724)
atcataaagttttggagctcatctctgcatctagccatggcggctaggaggatctcctcgttgctctctcgttctctctctgtctcttctgctttttctctttctctaggcaaaaatttcaacagagggaaaagcatccatcgctttagcactgcagcagcagcagttgaagaactcatcactccaactgttcagataaattacactcaacttctaattaatgggcaatttgtagatgcagcatctggtaatcatttttgtgtgggcaatgtttccatcattaatgaatcatgtatgaaaccgatgtcggtatcattacaggaaaaacattccccacctttgaccctcgcacgggagaagtgattgctaatgttgcagaaggtgatgcagaagatatcaatcgggcagtgtctgctgctcgaaaggcgtttgatgaaggaccatggccaaggatgagcccctatgaaaggtcgcggatattgttgcggtttgctgatttagccgagaaacacaatgatgagcttgcagctctagagacatggaataatgggaagccatatgaacaggctgccaaagctgaattgccactgtttgttcgtctatttcgctattatgcaggttgggcagataaaatccatggtttaacagttcaggctgatggcccacaccatgttcagatattgcacgagccaattggtgttgcgggacagattattccctggaattttcctcttatgatgtttgcttggaaagttggacccgcactagcatgtggtaataccattgtcctaaagacagcagagcaaacacctttgactgctctctttgcggcaaagctatttcatgaggctggtcttcctcccggtgttttaaatatcgtgtccggctatggtccgactgctggtgctgctcttgctagtcatatggatgtggacaagattgctttcacggggtcgactgatactggtaagattgtacaagaattggctgcaaaaagcaatcttaaaccagtaacgctagagcttggaggtaaatcacctttcattgtatgtgaggatgctgacattgatcaagctgtagagctagcacactttgctctgttctttaatcagggacaatgctgctgtgctgggtctcggacatttgttcatgagagtgtatacgatgagtttattgagaaagcaaaggcacgtgctctgagtcgcacggtcggtgatcctttcaagaagggcatcgagcaaggtcctcagatcgacccagagcaatttgcaaaggttctcagatacataaaatctggtgttgaaagcaatgccacccttgaatgtggaggtggaagaattggctcaaaaggctactttgtccaacccactgttttctcaaatgttcaggatgatatgctgattgcaaaggatgagatctttggccctgtacaatccatcttgaaatacaaggaccttgatgaagtgattaggagggcaaattcaacgcgatacggtctagcagcaggggtgttcacaaagaacatcaacactgccaacaccttgacaagagcattgagagtggggactgtatgggtgaattgcttcgatgtgtttgatgctgcaatcccatttggtgggtacaagatgagtggagtaggaagggaaaagggaatctacaacctcaataactacttgcaggtgaaggctgtgattactccactgaggaatccagcttggctgtgagtctgtcccagcgtcgcccattacaaataaagatgatcatagatgcatcactgtaattgcgcccatatcatcagaccccctttgcttgttttcactttgactgcctccagagaatatagcaccaactctatcaaacttcagctctgcctcctgccttgtgttatcaagtggtttgcatatgatatattcttgatgagtgaagtctatttttctgccaaaaaaaaaaaaaaaaaaaaa

SEQ ID NO: 340 - protein, 477 aa, Vitis pseudoreticulata
MYETDVGIITGKTFPTFDPRTGEVIANVAEGDAEDINRAVSAARKAFDEGPWPRMSPYERSRILLRFADLAEKHNDELAALETWNNGKPYEQAAKAELPLFVRLFRYYAGWADKIHGLTVQADGPHHVQILHEPIGVAGQIIPWNFPLMMFAWKVGPALACGNTIVLKTAEQTPLTALFAAKLFHEAGLPPGVLNIVSGYGPTAGAALASHMDVDKIAFTGSTDTGKIVQELAAKSNLKPVTLELGGKSPFIVCEDADIDQAVELAHFALFFNQGQCCCAGSRTFVHESVYDEFIEKAKARALSRTVGDPFKKGIEQGPQIDPEQFAKVLRYIKSGVESNATLECGGGRIGSKGYFVQPTVFSNVQDDMLIAKDEIFGPVQSILKYKDLDEVIRRANSTRYGLAAGVFTKNINTANTLTRALRVGTVWVNCFDVFDAAIPFGGYKMSGVGREKGIYNLNNYLQVKAVITPLRNPAWL

SEQ ID NO: 341 - DNA, 1887 bp, Vitis pseudoreticulata
  CDS (37)..(1650)
atcataaagttttggagctcatctctgcatctagccatggcggctaggaggatctcctcgttgctctctcgttctctctctgtctcttctgctttttctctttctctaggcaaaaatttcaacagagggaaaagcatccatcgctttagcactgcagcagcagcagttgaagaactcatcactccaactgttcagataaattacactcaacttctaattaatgggcaatttgtagatgcagcatctggaaaaacattccccacctttgaccctcgcacgggagaagtgattgctaatgttgcagaaggtgatgcagaagatatcaatcgggcagtgtctgctgctcgaaaggcgtttgatgaaggaccatggccaaggatgagcccctatgaaaggtcgcggatattgttgcggtttgctgatttagccgagaaacacaatgatgagcttgcagctctagagacatggaataatgggaagccatatgaacaggctgccaaagctgaattgccactgtttgttcgtctatttcgctattatgcaggttgggcagataaaatccatggtttaacagttcaggctgatggcccacaccatgttcagatattgcacgagccaattggtgttgcgggacagattattccctggaattttcctcttatgatgtttgcttggaaagttggacctgcactagcatgtggtaataccattgtcctaaagacagcagagcaaacacctttgactgctctctttgcggcaaagctatttcatgaggctggtcttcctcccggtgttttaaatatcgtgtccggctatggtccgactgctggtgctgctcttgctagtcatatggatgtggacaagattgctttcacggggtcgactgatactggtaagattgtacaagaattggctgcaaaaagcaatcttaaaccagtaacgctagagcttggaggtaaatcacctttcattgtatgtgaggatgctgacattgatcaagctgtagagctagcacactttgctctgttctttaatcagggacaatgctgctgtgctgggtctcggacatttgttcatgagagtgtatacgatgagtttattgagaaagcaaaggcacgtgctctgagtcgcacggtcggtgatcctttcaagaagggcatcgagcaaggtcctcagatcgacccagagcaatttgcaaaggttctcagatacataaaatctggtgttgaaagcaatgccacccttgaatgtggaggtggaagaattggctcaaaaggctactttgtccaacccactgttttctcaaatgttcaggatgatatgctgattgcaaaggatgagatctttggccctgtacaatccatcttgaaatacaaggaccttgatgaagtgattaggagggcaaattcaacgcgatacggtctagcagcaggggtgttcacaaagaacatcaacactgccaacaccttgacaagagcattgagagtggggactgtatgggtgaattgcttcgatgtgtttgatgctgcaatcccatttggtgggtacaagatgagtggagtaggaagggaaaagggaatctacaacctcaataactacttgcaggtgaaggctgtgattactccactgaggaatccagcttggctgtgagtctgtcccagcgtcgcccattacaaataaagatgatcatagatgcatcactgtaattgcgcccatatcatcagaccccctttgcttgttttcactttgactgcctccagagaatatagcaccaactctatcaaacttcagctctgcctcctgccttgtgttatcaagtggtttgcatatgatatattcttgatgagtgaagtctatttttctgccaaaaaaaaaaaaaaaaaaaaa

SEQ ID NO: 342 - protein, 537 aa, Vitis pseudoreticulata
MAARRISSLLSRSLSVSSAFSLSLGKNFNRGKSIHRFSTAAAAVEELITPTVQINYTQLLINGQFVDAASGKTFPTFDPRTGEVIANVAEGDAEDINRAVSAARKAFDEGPWPRMSPYERSRILLRFADLAEKHNDELAALETWNNGKPYEQAAKAELPLFVRLFRYYAGWADKIHGLTVQADGPHHVQILHEPIGVAGQIIPWNFPLMMFAWKVGPALACGNTIVLKTAEQTPLTALFAAKLFHEAGLPPGVLNIVSGYGPTAGAALASHMDVDKIAFTGSTDTGKIVQELAAKSNLKPVTLELGGKSPFIVCEDADIDQAVELAHFALFFNQGQCCCAGSRTFVHESVYDEFIEKAKARALSRTVGDPFKKGIEQGPQIDPEQFAKVLRYIKSGVESNATLECGGGRIGSKGYFVQPTVFSNVQDDMLIAKDEIFGPVQSILKYKDLDEVIRRANSTRYGLAAGVFTKNINTANTLTRALRVGTVWVNCFDVFDAAIPFGGYKMSGVGREKGIYNLNNYLQVKAVITPLRNPAWL

SEQ ID NO: 343 - DNA, 1506 bp, Monascus anka
  CDS (1)..(1506)
atggccgaagcagcagccagaatcctagaagccctccctgcagtttgcgaatatcgctggtcctgcaaggacgcctccaagcgcttcacagtggtgaaccctgcgacaggagagcccatcactgtcgttcaggccggaaatctcgacacggtgcaaggggccatccaggcgtcgcacagggcgttcgagtcgtggcgatggaagactcgccaggagcggtcactctatctcctgcaggcggccgatgagcttcagaagcacagccatgaattggccgtcctgttgtgccttgagaacgggaaacccgtcaaagacgcgtcctttgatgttgggtttctggtgcaggtgtttcggtacttcggatcaattgtcgacaagctaccgtcggaattcttcgaccagggtagcatctactccagcgtgatctacgagccccatggagtgtgcgtgggcatcctgccgttcaactggccgccggtccacgccgggggcaaactggcgccttgtctggcggcgggcaacaccatggtgctgaagcccggcgagcaggccccgctgacactgatgcgcatcgttgagatcttgcagtccgtcttccccgccgacgtcgtccaggcagttccgggactgggtccggagataccgcaggccctgataaaccatccgcttgtcaagatggtctcgttgacaggatccacggcatcgggctcccaggctgcccaaacggccgcggtgaccctgacccccacggtgctcgagctaggcgggaagaatgccttcgtggtctttgaggacgccgacctggagttggtcgtgcgcgacgccatcgatggcgctttcttcaacaagggcgaatcgtgcaccgccgcatcgcggattctggtgcacaaagatctttacccgacgcttgtcagtcgcctgacggctgccgtgaagaaactgcgaacgggcgacggcctcgacgagacgacacacatcggcccggtggtctcgcgggagcgccagcaggaggtcctgtcgtacatcgagcaaggcaaacgcgagggggcgactctagctgcgcaaggagacccgcccacggcgggccgtctgtcgggagggttcttcgtccctcctacgctgtttaccgacgtgacagcagacatgaccattgcacagagggagatctttgggcccgtcgttaccgtcggttcttttgaaacggaggaggaagccgtgaagaccgtcaactcctcccaatacggactttttgcaggggtatactccagcgacttcacccgcgctatgcgtgtgactcggaaattggacgtgggcgttgtgttggtcaacaactacttccgcgccctcttggggacgccattcggaggcgtcaaggacagtggatatggtagggagcactggattggtaccttgagggaatggagccgggtcaaaaacgttcgcttccccagtggactgagtcctatcccagcttgggggggcgcagtcgatgtatgcaagttgtag

SEQ ID NO: 344 - protein, 501 aa, Monascus anka
MAEAAARILEALPAVCEYRWSCKDASKRFTVVNPATGEPITVVQAGNLDTVQGAIQASHRAFESWRWKTRQERSLYLLQAADELQKHSHELAVLLCLENGKPVKDASFDVGFLVQVFRYFGSIVDKLPSEFFDQGSIYSSVIYEPHGVCVGILPFNWPPVHAGGKLAPCLAAGNTMVLKPGEQAPLTLMRIVEILQSVFPADVVQAVPGLGPEIPQALINHPLVKMVSLTGSTASGSQAAQTAAVTLTPTVLELGGKNAFVVFEDADLELVVRDAIDGAFFNKGESCTAASRILVHKDLYPTLVSRLTAAVKKLRTGDGLDETTHIGPVVSRERQQEVLSYIEQGKREGATLAAQGDPPTAGRLSGGFFVPPTLFTDVTADMTIAQREIFGPVVTVGSFETEEEAVKTVNSSQYGLFAGVYSSDFTRAMRVTRKLDVGVVLVNNYFRALLGTPFGGVKDSGYGREHWIGTLREWSRVKNVRFPSGLSPIPAWGGAVDVCKL

SEQ ID NO: 345 - DNA, 1497 bp, Aspergillus oryzae
  CDS (1)..(1497)
atgtcagcccccatccctcatgtatcaaactggatcaacggcgcctacacaacggcaaccacccaagtaatcacagtcctcaaccccgcgaccgaaacacccatcgcgacaatcgactccacaccccaagaaacagtcaccaccatcgtcgcagactcagtccaaaccttccacaaaggaccatggtccaaaaccgagccctcagaccgcttcacagtcctctccaccgccgcccgacttcttcgcacgcgtctacccgaattcatcgagctcgaaacccgccaaaccggccgtcccatccgcgagatgcaaacccaattatttcgcgtccctgaatggctcgaatacttcgcctcgctggcccgcgttcacgaaggccgagtaacacccttcaagggccccgtcgtgaacaccctcacccgtctcccactcggtgtcgtcgcgcagatcacgccgtacaatcatccattgctaatcgcgacgaagaaaatcgccgcagccctggcagccggaaacgttgtgattgtaaaaccgagcgagcttgcacccttatccgtcttgaaactgggtcccctctttcaagaggcagggttacctgacggcgtcctgcaaattatgtccggacatgggttcgagacgggaaagttcctctgcgagtcgccgctgttagctaagatcgatcttacagggggattggggacatatcgggccgtcgcgcccgttgcagcacggaatatggtccccgttacggcggagttgggtggtaaggcgcctgtttgtctgtttccgagtttggaggttgagagggcggttcaggcagcgttgttcgcggggtttattgctagtggacagacgtgtgtgactgggagtcgattgttggttcatcgagacatttatggggcgtttcgagagttattggagaagagggttagggggttgagggtaggagatccgatggatggacggacgcagattgggacggttatctcgaaggcggcggtggagagatgtgctgcttttgtggatcgtgcggtgcaggagggtgggaatgtgctttgtggtgggcgttcgacgacgggaccagatgggaaggggttcttctttgaacctacgattattgaagttagagcggattcgcatatcgcgtgtaatgaggtgtttggaccggttattgcgctgattgagtgtgaatctgaggaggagattgtttctattgcgaatagtacgccgtttgcgcttggggcctcggtttggacaaatgactttaatcaggcgcatcgcgttgcggagaagattgatgcgggcattgtgtggattaatggtcatcatctgaatgatccgtcgtcgccgtggggtgggttcaaggagagtggaattgggaaagaaaatggcctggaggcgtatgagagttataccaaggtcaaaagcacgcttattaactatggggttgcccctgtgtggtttgatgatgaggctaccaatgcacgatatggatag

SEQ ID NO: 346 - protein, 498 aa, Aspergillus oryzae
MSAPIPHVSNWINGAYTTATTQVITVLNPATETPIATIDSTPQETVTTIVADSVQTFHKGPWSKTEPSDRFTVLSTAARLLRTRLPEFIELETRQTGRPIREMQTQLFRVPEWLEYFASLARVHEGRVTPFKGPVVNTLTRLPLGVVAQITPYNHPLLIATKKIAAALAAGNVVIVKPSELAPLSVLKLGPLFQEAGLPDGVLQIMSGHGFETGKFLCESPLLAKIDLTGGLGTYRAVAPVAARNMVPVTAELGGKAPVCLFPSLEVERAVQAALFAGFIASGQTCVTGSRLLVHRDIYGAFRELLEKRVRGLRVGDPMDGRTQIGTVISKAAVERCAAFVDRAVQEGGNVLCGGRSTTGPDGKGFFFEPTIIEVRADSHIACNEVFGPVIALIECESEEEIVSIANSTPFALGASVWTNDFNQAHRVAEKIDAGIVWINGHHLNDPSSPWGGFKESGIGKENGLEAYESYTKVKSTLINYGVAPVWFDDEATNARYG

SEQ ID NO: 347 - DNA, 2195 bp, Zea mays
  CDS (254)..(1903)
cccaaaccaaatccaagcgcaagagggggcaaagccgcaaagggggaggcaccaggcaccggcagccattacttactggtcctcactcccacaccaaccaaccaacctcctctgcctgccgcttctcctgctgcgggcgggcactgctgcaagtactagaggaggacatccgcttccattactgcgcctgcggaggatcggaggaaccagtagcggaggcttcgattttcggcgggcgcaataaatttcccgcatggctcggagggccgcgtcctcgctcgtctcccgctgcctcctggcgagggcccctgccggcgcgccgcccgctgccccctctgcgccgcgcaggacagtgcctgcagatgggatgcacaggctgttgccaggtgtccttcagaggttcagcactgcagcagcagtagaggagcccatcacgccgtcagtccatgtgaactacacaaagctcctcattaatgggaactttgttgattccgcatccggcaagaccttcccaactctggaccctcgtacaggggaggtgattgctcatgtggctgagggtgacgcagaggacattaaccgtgcagtagctgcggctcgcaaggcttttgatgaagggccatggccgaagatgactgcctatgagaggtcccgtatcctactgcggtttgctgatttgatagagaagcacaatgacgagcttgctgctttggagacatgggacaacgggaagccatatgagcaagcagcccagattgaagtacccatggtggcccgtcttatgcgttactatgctggttgggctgataagatccatgggctcattgtgccggctgatggcccacaccatgtacagatcttgcatgagccaattggtgttgcaggtcagatcatcccatggaactttcctcttctgatgtatgcctggaaagttggccctgctttggcatgtggaaatactctcgtgctcaagactgctgaacaaacccctctatcggctttgtatatctccaaattgttgcatgaggctggactacctgagggtgttgtgaatgtcgtttctggttttggccctactgctggtgctgctcttgctagtcacatggatgttgataagatcgcatttactggatctaccgatactggaaaaattattctcgagttggctgcaaagagcaaccttaagacagtgacactggagttaggaggcaagtcccctttcatcataatggacgatgctgatgttgaccatgctgttgagcttgcgcactttgccctgttctttaaccagggacaatgctgctgcgctggatctcgcacgtttgtacatgagcgtgtttatgatgagtttgtggagaaggccaaggctcgtgcattgaagcgcgtcgttggtgatccgttcaggaaaggtgttgaacagggcccgcagattgacgacgagcaattcaacaagatcttgcgctacattaggtatggtgttgacggtggagctacccttgtgacgggtggtgataggttgggtgacaagggtttctacatccagccaacgattttctcagatgtccaggacggcatgaagattgctcaggaggagatatttgggcctgtgcagtcgatcctcaagttcaaagacctcaatgaggttatcaagagggcaaacgcgagccagtatggattggccgccggcgtgttcaccaacagcctggacacggccaacaccctgacgcgcgcgctcagggccgggaccgtctgggtgaactgcttcgacgtcttcgatgctgcgattccgtttggtgggtacaagatgagcggcatcgggagggagaagggcgttgacagcctgaagaactacctgcaggtgaaggcggtcgtcaccccaatcaagaacgccgcgtggttgtagacgctgcaagtgtggccttgtgcacgagaaccacgtatattcatttcctggtcacatccccgaacaatgtgaaggcgttaatcagatagatgacgatgaagaagaacaactataataagatttgccctagcctgggttctcagttatctctaataagttttatggttggtgcctatatattgtgcaatttggttgctcccttttattttgtttctttttgataagactgttctagcaacggatatgcagagttcattatgaaaatgcatttgttagtgtctttgatggttaa

SEQ ID NO: 348 - protein, 549 aa, Zea mays
MARRAASSLVSRCLLARAPAGAPPAAPSAPRRTVPADGMHRLLPGVLQRFSTAAAVEEPITPSVHVNYTKLLINGNFVDSASGKTFPTLDPRTGEVIAHVAEGDAEDINRAVAAARKAFDEGPWPKMTAYERSRILLRFADLIEKHNDELAALETWDNGKPYEQAAQIEVPMVARLMRYYAGWADKIHGLIVPADGPHHVQILHEPIGVAGQIIPWNFPLLMYAWKVGPALACGNTLVLKTAEQTPLSALYISKLLHEAGLPEGVVNVVSGFGPTAGAALASHMDVDKIAFTGSTDTGKIILELAAKSNLKTVTLELGGKSPFIIMDDADVDHAVELAHFALFFNQGQCCCAGSRTFVHERVYDEFVEKAKARALKRVVGDPFRKGVEQGPQIDDEQFNKILRYIRYGVDGGATLVTGGDRLGDKGFYIQPTIFSDVQDGMKIAQEEIFGPVQSILKFKDLNEVIKRANASQYGLAAGVFTNSLDTANTLTRALRAGTVWVNCFDVFDAAIPFGGYKMSGIGREKGVDSLKNYLQVKAVVTPIKNAAWL

SEQ ID NO: 349 - DNA, 1799 bp, Sorghum bicolor
  CDS (91)..(1575)
  misc_feature (117)..(117): n is a, g, c or t
accgagcagccgcaggccaacctgaaagcggcggcggcggcggcagcaggtcactcctctgtcctctcgtctccagtccaccgcatcgccatggccgccgcagacgtcccccggccntctttcattggcggggactggagggagccgtgcctccctgtctgtcaaccctccacggaggccaccatcggcgacataccggcgggcacggcggaggacgtggagatgccggtcgcgcggggacgcgtttccgacggcggagcactggtcgcgtgcctctggggccgtgcgagccaactttctcatacgatcgccgccaagattaaagataggaaatctgagagcttggctttgctggagacacttgattctgggaagcctctggatgaagcaagtgcagacatggatgatgtcgctgcatgctttgagtactatgctgatctggcggaagctttagatgggaagcaacgttcaccaatctctctgcctatggaaaacttcaagtcatatgtacttaaagaaccattgggggttgttggactgatcactccttggaactatcctctgttgatggcaacttggaaggtcgcacctgccttggctgctgggtgtacagctgtattaaagccttcagaattggcttctgtgagttgcttagagcttggtgcaatatgtatggaaataggcctaccaccaggtgtcttcaatgtaattactggtctgggcctgaagctggtgctccattatcctcacatcccatgtggcataagattgcttttactcggaagtacagaaactggtaagaggataatgacttcagctgcgcaaatggttaagcccgtttcattagagcttggtgggaaaagtcctcttattgtctttgatgacattcgtgacattgacaaagctgttgaatggaccatgtttgggatcttgccaaatgctggtcaagtctgcagtgctgcttctcgtctactgctgcatgagaaaatggcaaagaaattcttggatagattggtgcatggggcaaagaatataaaagtctcagatccactggaggaaggcggcagactgggttcagttgtcagtgaaggacagtacgaaaagataaagaagttcatctcaactgcaagaagtgaaggtgccacaattctgtatggaggtgcccgaccacagcatctcaaaagagggttctttcttgaacctacaattataacagatgttagtacgtcaatgcaaatttggcgagaggaagtctttggacctgtcatctgcgttaaagaattcaggagagagagtgaagctgtggaacttgcaaatgatactcagtatggtttagctggtgccgtgatctccagtgatcaagagaggtgccgagccatttcaaaggctcttcaatctgcaattgataactgctcgcaaccatgcttcgtccaagctccatggggagggaacaagcggatgtttggtcgggagctcggagaatggggccttgataactacatgaccgtgaagcaagtcaccaagtattgctcggatgaaccgtggggatggtaccagcctccatccaagctgtgaaggggcattcattccaggagaatggagcgcatcatcattaactgttcatggacaggagcttatgtatagtacagtcgtcgtcaataaaacgtctctgatgagaagttcgttctacttgcactactacatataggttcaggactgaagagtactatactagtatcatgggttgttagtctgcattcttatcattcgaagttaataaagataattggataatctta

SEQ ID NO: 350 - protein, 494 aa, Sorghum bicolor
MAAADVPRPSFIGGDWREPCLPVCQPSTEATIGDIPAGTAEDVEMPVARGRVSDGGALVACLWGRASQLSHTIAAKIKDRKSESLALLETLDSGKPLDEASADMDDVAACFEYYADLAEALDGKQRSPISLPMENFKSYVLKEPLGVVGLITPWNYPLLMATWKVAPALAAGCTAVLKPSELASVSCLELGAICMEIGLPPGVFNVITGLGLKLVLHYPHIPCGIRLLLLGSTETGKRIMTSAAQMVKPVSLELGGKSPLIVFDDIRDIDKAVEWTMFGILPNAGQVCSAASRLLLHEKMAKKFLDRLVHGAKNIKVSDPLEEGGRLGSVVSEGQYEKIKKFISTARSEGATILYGGARPQHLKRGFFLEPTIITDVSTSMQIWREEVFGPVICVKEFRRESEAVELANDTQYGLAGAVISSDQERCRAISKALQSAIDNCSQPCFVQAPWGGNKRMFGRELGEWGLDNYMTVKQVTKYCSDEPWGWYQPPSKL

SEQ ID NO: 351 - DNA, 1503 bp, Beta vulgaris
  CDS (1)..(1503)
atgtcgatgccaattccttctcgtcaattattcattgatggagagtggagagaacccatcaagaagaatcgcatccctattatcaacccatctaatgaggagatcatcggtgatattccggcgggcagttccgaggatatagaggttgcggtggcggccgctcgaagagcccttaagaggaataagggaagagagtgggctgctacatctggagctcatcgtgccagatatttgcgtgctattgctgctaaagtgacagaaagaaaagatcattttgttaaacttgaaacgattgattctgggaaaccatttgatgaagcagtgttggatattgatgatgtggccacatgttttgaatattttgccggtcaagcagaagccatggacgctaaacaaaaagctcccgtcacccttccgatggagagattcaaaagtcatgttctcaggcagcccattggtgttgttggattgattaccccatggaattacccacttctaatggctacatggaaaattgctccagctcttgctgctgggtgtacagctgtactgaagccatcagagttggcatctataacttgcctagaatttggagaagtttgcaatgaagtgggacttcctccgggggtgttgaatattgtgactggattgggtccagatgccggtgcaccgctagcagctcatcctgatgttgacaaggttgcatttactggaagtagtgccactggcagcaaagtgatggcttcagctgctcaattggttaagcctgttacattggaacttggaggtaaaagtcctattatcgtgttcgaagatgttgatgttgatcaagttgttgaatggaccatgtttggctgtttctggacaaatggtcaaatatgcagtgcaacatccagactgcttgtgcatgaaagtattgcagctgaatttattgataggcttgtaaagtggaccaaaaacattaagatatctgatccatttgaggaaggctgtcgacttggccctgttattagtaaggggcagtacgataaaattatgaagttcatatcaacagcaaagagtgagggggcaactatcttgtgtggaggttcccgtcctgagcatttgaagaaagggtatttcatcgaaccaactattataagtgatatctccacatccatgcaaatatggagggaagaagtttttggccctgtcttatgtgttaaaacattcagttctgaagatgaagctcttgaattggcaaatgatacagagtatggtttagcttctgctgtgttttcaaaagaccttgaaaggtgtgaaagggtatcgaagcttttggaatctggagccgtgtgggttaattgctcacaaccatgctttgttcatgctccatggggaggcatcaagcgtagtggttttggacgtgagcttggggaatggggtatcgagaattacttgaacatcaagcaggtcacgtcggatatttctaacgaaccatggggatggtacaagtctccttaa

SEQ ID NO: 352 - protein, 500 aa, Beta vulgaris
MSMPIPSRQLFIDGEWREPIKKNRIPIINPSNEEIIGDIPAGSSEDIEVAVAAARRALKRNKGREWAATSGAHRARYLRAIAAKVTERKDHFVKLETIDSGKPFDEAVLDIDDVATCFEYFAGQAEAMDAKQKAPVTLPMERFKSHVLRQPIGVVGLITPWNYPLLMATWKIAPALAAGCTAVLKPSELASITCLEFGEVCNEVGLPPGVLNIVTGLGPDAGAPLAAHPDVDKVAFTGSSATGSKVMASAAQLVKPVTLELGGKSPIIVFEDVDVDQVVEWTMFGCFWTNGQICSATSRLLVHESIAAEFIDRLVKWTKNIKISDPFEEGCRLGPVISKGQYDKIMKFISTAKSEGATILCGGSRPEHLKKGYFIEPTIISDISTSMQIWREEVFGPVLCVKTFSSEDEALELANDTEYGLASAVFSKDLERCERVSKLLESGAVWVNCSQPCFVHAPWGGIKRSGFGRELGEWGIENYLNIKQVTSDISNEPWGWYKSP

SEQ ID NO: 353 - DNA, 1918 bp, Chrysanthemum lavandulifolium
  CDS (127)..(1647)
acaaactccaacacctttacataaactctgcaacaaaaacaacacatcacacacatcaatccatctgccattaactctccgtcaaattaatcactattcagttagttaactttttgatcaaagaagatgacaacgacaatcccgataccatcacgacagttatttattgacggtgaatggagagagcctgtcaaaaagaatcgtatttctgttattaatccttctactgaacagatcgttggggatataccagcagctactgctgaggatgttgacgttgctgtaaaagcagctcgtaaagctcttaaacgcaacggagggaaagattgggcttcagctactggagcgcatcgtgcaaagtatctgcgtgctattgctgctaagataactgagaagaaagagttattctctaaacttgaagcgattgattgtggaaagccatatgatgaagcagcatgggatatagatgatgttgctggatgtttcgaatataatgctgatcttgctgaagctttagataaaaagcaaaatgcgccgattgagcttccaatggatacatttaagtgtcatgtaattaaggaacctattggagttgttgggctaattactccatggaactacccattgttaatggctacatggaaagttgcgcctgctttggccgctggctgtgctgcgatacttaaaccatcagaactggcatctctcacgtgcctagaattaggtgaagtatgcaaggaggtggggcttcccgccggtgttctcaatattctgactggtttaggtccagatgcaggtgctcctttggctgctcaccctgatgttgataagattgcacttactggaagcagtgccacaggtagcaagattatgactgctgcagctcaaaatgtcaagcctgttacccttgagcttggtggaaagagtccaatagttgtgtttgatgatgttgacattgataaagctgttgagtggacactatttggttgcttctggactaacgggcaaatctgcagtgcaacttctcgtctcatactacatgaaagtattgctaaggagtttttagacaagcttgtgaagtgggctaaaaatatcaagatttcagacccgttggaggaaggttgtaggcttggacctgtggttagtagtggacagtacgagaaggttttgaagtttgttgaaacagccagaagtgaaggtgctaccatattgtcaggagggcaacgtccccaacatttgaaaaagggattttttatcgagccagccatcattactgacatcactacatccatgcaagtatggagagaggaagtttttggacctgttctctgtgtaaaaacattttcatctgaagaagaagcaattgagttagcaaacgacactcactatggcttgggttctgctgtaatatccaacgatttggaccggtgtgatcgtgtaacaagggcttttgacgcaggtattgtatgggtgaattgttcacagccatgcttctgtcaagctccatggggtggcaaaaagcgtagtggttttggtcgtgaacttggagaatggggactcgataactacttgagcgtaaagcaggtgactcgttacatctccaacgatgcttggggttggtatacacctccatctcctaagctttaagaggacagaaggccagtgtaccattatcaaaggcagcccgaaacgcaaggagatttattagcacttgtgattccgtgttccctgttttagctgcatatttaataggatgaacttgatgtttgtttggatttcaagtaatttcaagtaatcgcaataaaaggagattggattttcttattatatggtgtgttggaagctggtatgtggacttgagttaatgtaatgttatttaatgcgtccttgatgtttaagtaaaaaaaaaaaaaaaaaa

SEQ ID NO: 354 - protein, 506 aa, Chrysanthemum lavandulifolium
MTTTIPIPSRQLFIDGEWREPVKKNRISVINPSTEQIVGDIPAATAEDVDVAVKAARKALKRNGGKDWASATGAHRAKYLRAIAAKITEKKELFSKLEAIDCGKPYDEAAWDIDDVAGCFEYNADLAEALDKKQNAPIELPMDTFKCHVIKEPIGVVGLITPWNYPLLMATWKVAPALAAGCAAILKPSELASLTCLELGEVCKEVGLPAGVLNILTGLGPDAGAPLAAHPDVDKIALTGSSATGSKIMTAAAQNVKPVTLELGGKSPIVVFDDVDIDKAVEWTLFGCFWTNGQICSATSRLILHESIAKEFLDKLVKWAKNIKISDPLEEGCRLGPVVSSGQYEKVLKFVETARSEGATILSGGQRPQHLKKGFFIEPAIITDITTSMQVWREEVFGPVLCVKTFSSEEEAIELANDTHYGLGSAVISNDLDRCDRVTRAFDAGIVWVNCSQPCFCQAPWGGKKRSGFGRELGEWGLDNYLSVKQVTRYISNDAWGWYTPPSPKL

SEQ ID NO: 355 - DNA, 1821 bp, Chrysanthemum lavandulifolium
  CDS (113)..(1624)
acacctttacatacactctgcaacaaaaacaacacattcatcaatccatctgccattaactctccgtcaaattaatcactaattcagttacttaacttttatatcaaaaaatatgacaacgataccatcacgacagttatttatcgacggtgaatggagagagcctgttaaaaagaatcgtattcctgttattaatccttctactgaacagatcgtcggggatataccagcagctactgctgaggatgttgatgttgctgtaaaagcagctcgtaaagctcttaaacgcaatggagggaaagattgggcttctgctactggagcacatcgtgcaaagtatcttcgtgccattgctgcaaagataactgggaagaaagaattattctctaaacttgaagcgattgattgtggaaagccatatgatgaagcagcatgggatatagatgatgttgctggatgtttcgaatataatgctgatcttgctgaagctttagataaaaagcaaaatgcgcctattgagcttccaatggatacatttaaatgtcatgtaattaaggaacctattggtgttgttgggctaattactccatggaactacccattgttaatggctacatggaaagttgcgcctgctttggccgctggttgtgctgcgatacttaaaccatcagaactggcatctctcacgtgcctggaattaggtgaagtatgcaaggaggtggggcttcccgctggtgttctcaatattctgactggtttaggtccagatgcaggtgctcctttggctgctcaccctgatgttgataagattgcatttactggaagcagtgccactggtagcaagattatgactgctgcagctccaaatgtcaagcctgttacccttgagcttggtggaaagagtccaattgttgtgtttgatgatgttgacattgataaagctgttgagtggacactatttggttgcttctggactaatgggcaaatctgcagtgcaacttctcgtctcatactacatgaaagtattgctaaggagtttttagacaagcttgtgaagtgggctaaaaatatcaagatttcagacccgttggaggaaggttgtaggcttggacctgtggttagtagtggacagtacgagagggttttgaagtttgttgaaacagccagaagtgaaggtgctaccatattgtcaggagggcaacgtccccaacatttgaaaaagggattttttatcgagccagccatcattactgacatcactacatccatgcaaatatggagagacgaagtttttggacctgttctctgtgtaaaaacattttcatctgaagaagaagcaattgagttagcaaacgacactcattatggcttgggttctgctgtaatatccaacgatttggaccggtgtgatcgtgtaacaagggcttttgacgcaggtattgtatgggtgaattgttcacagccatgcttctgtcaagctccatggggtggcaaaaagcgtagtgggtttggtcgcgaacttggagaatgggggctcgataactacttgagcgtaaagcaggtgactcgttacatctccaacgatgcttggggttggtatacacctccatctcctaagctttaagagggcagaagtccagtgtaccattgtcaaaggtagcccgaaacgcaaggagatttattagtacttgtgattccgtgtttcctgttttagctgcatatttaataggatgaacttgatgtttgtttgaatttgaatttcaagtaatcgcaataaaaggagatggaattttcttattaaaaaaaaaaaaaaaaaaaaaa

SEQ ID NO: 356 - protein, 503 aa, Chrysanthemum lavandulifolium
MTTIPSRQLFIDGEWREPVKKNRIPVINPSTEQIVGDIPAATAEDVDVAVKAARKALKRNGGKDWASATGAHRAKYLRAIAAKITGKKELFSKLEAIDCGKPYDEAAWDIDDVAGCFEYNADLAEALDKKQNAPIELPMDTFKCHVIKEPIGVVGLITPWNYPLLMATWKVAPALAAGCAAILKPSELASLTCLELGEVCKEVGLPAGVLNILTGLGPDAGAPLAAHPDVDKIAFTGSSATGSKIMTAAAPNVKPVTLELGGKSPIVVFDDVDIDKAVEWTLFGCFWTNGQICSATSRLILHESIAKEFLDKLVKWAKNIKISDPLEEGCRLGPVVSSGQYERVLKFVETARSEGATILSGGQRPQHLKKGFFIEPAIITDITTSMQIWRDEVFGPVLCVKTFSSEEEAIELANDTHYGLGSAVISNDLDRCDRVTRAFDAGIVWVNCSQPCFCQAPWGGKKRSGFGRELGEWGLDNYLSVKQVTRYISNDAWGWYTPPSPKL

SEQ ID NO: 357 - DNA, 1762 bp, Zea mays
  CDS (16)..(1533)
acgcggggaccgatgatggcctcgcaagcgatggtaccgctgcggcagctctttgtcgacggcgagtggcgcccgcccgcgcagggccgccgcctccccgtcgtcaaccctaccactgaggctcacatcggcgagatcccggcgggcacggcggaggacgtggacgccgcggtggcggcggcgcgcgcggcgctcaagaggaaccgcggccgcgattgggcgcgcgcgccgggggccgttcgggccaagtacctccgcgccatcgccgccaaggtaattgagaggaaacaagagctagctaagctagaggcacttgattgcgggaagccttatgatgaagctgcatgggacatggatgatgttgctgggtgctttgagtacttcgcagatcaggcagaagctttggacaaaagacaaaattccccagtttctcttccgatggaaacttttaaatgccatctccgaagagagcctattggggtagttgggctgataactccttggaactatcctctcctgatggctacatggaaggtagctcctgctctggctgctggttgtgcagctgtgctaaagccatctgaattggcttctgtgacttgcttagagcttgctgatatctgtaaagaagtcggtcttcctcccggtgtcttaaacattgtgacaggattaggtcctgatgctggtgctcctttgtcagcacacccagatgttgacaaggtcgcctttactgggagttttgaaactggtaagaagattatggcggctgcagctcctatggttaagcctgttacactggaacttggtggaaaaagtcctatagtagtatttgatgatgttgacattgacaaagctgttgagtggactctgtttgggtgcttttggaccaatggtcagatttgcagcgcaacatctcgtcttcttgtccatacaaaaattgctaaaaaatttaatgagaggatggttgcatgggccaaaaatattaaggtttcggatccacttgaagagggttgcaggcttgggccagttgttagtgaaggacagtatgagaagattaaaaagttcatattgaatgccaaaagcgaaggtgctactattctgactggaggtgttagacctgcgcatcttgagaaggggttctttattgaaccaacaatcattactgatatcaccacatcaatggaaatttggagggaggaagtctttggtccagtcctgtgcgttaaagaatttagcactgaagatgaagccattgaactggccaatgatacacagtatggtttagctggtgctgtaatttctggtgatcgggagcgctgccagagattatctgaggagattgatgctggaattatctgggtaaactgctcacagccctgcttctgccaagctccctggggcggtaacaagcgtagtggatttggacgtgagcttggagaagggggcattgataactacctgagcgtcaagcaagtcacggagtacatctctgatgagccgtggggatggtatcgatccccctccaagctgtaaactggcaagacgaaaatttgtttgttccattagaataaatatatctcgatgctatacagaacgaacccgtgtatcaaatggagtatgacattgtgaaaaaggcacatctgcaggataaaggcgagagttgagttgaaaccaaaaattttggaactgtgccattataagaggtggattttgtcaaaaaaaaaaaaaaaaaaaaaaaaaaaaaaaaaaaaaaaaaaaaaaa

SEQ ID NO: 358 - protein, 505 aa, Zea mays
MASQAMVPLRQLFVDGEWRPPAQGRRLPVVNPTTEAHIGEIPAGTAEDVDAAVAAARAALKRNRGRDWARAPGAVRAKYLRAIAAKVIERKQELAKLEALDCGKPYDEAAWDMDDVAGCFEYFADQAEALDKRQNSPVSLPMETFKCHLRREPIGVVGLITPWNYPLLMATWKVAPALAAGCAAVLKPSELASVTCLELADICKEVGLPPGVLNIVTGLGPDAGAPLSAHPDVDKVAFTGSFETGKKIMAAAAPMVKPVTLELGGKSPIVVFDDVDIDKAVEWTLFGCFWTNGQICSATSRLLVHTKIAKKFNERMVAWAKNIKVSDPLEEGCRLGPVVSEGQYEKIKKFILNAKSEGATILTGGVRPAHLEKGFFIEPTIITDITTSMEIWREEVFGPVLCVKEFSTEDEAIELANDTQYGLAGAVISGDRERCQRLSEEIDAGIIWVNCSQPCFCQAPWGGNKRSGFGRELGEGGIDNYLSVKQVTEYISDEPWGWYRSPSKL

SEQ ID NO: 359 - DNA, 1401 bp, Streptomyces viridochromogenes
  CDS (1)..(1401): transl_table=11
atgttcgtcaacggagcactgcagccggcccgacggcacaccacggtccacgaccgctggacgggcgagcccgtcggcaccgtcccgcgcgacggtgccgaggaggcggcggccgcggtcgccgcgctggccgccggccgtcgtgccacgactccccagcagcggtcggccgtcctgacccgggcggccgacatgctcacggcccgtgcggaggagttctccacgctcatcaccgccgagtccggcgtgtgccgcaaggagaccctgcgcgaggtgtcccgggccgccgggaacctcagggtggccgccgcggaggcggagcggatccgcggcgagtccatcccgctgcccgacggcaccagactggcggtcaccctgcccgagccggtcggtgtcgtcctgggcatcacccccttcaaccgccccctcaaccaggtcgtcgtcaaagccgcgccggccctggccgcaggctgcccgctgctgctcaagccgtcggagaagacgccgctgacggcactggccttcgccgaactgctcgtcgaggccggctgcgccaaggacatgctcgccgtcgtcaccggcgaacccggcgaggtcggcccgccgctcgccgcccacccggacgtcgccatggtgacgttcaccggcagcgtggccaccgggcacgcggtggcagcccaggcggccggcaagcggcagctgctcgaactgggcggcaacgacccgctgttcgtactgcccgacgccgacctgagacgcgccgccaagctggccgccgacgggtcctgcgccacagccggccagtcctgccgcggcatcaaacgcgtcttcgtctgggaggaggtggccgacgagttcacggccctgctggagccggccgtagccgccaagcgcgccggtgacccccgccgggaggacaccgacctcggcccgctcgtcagcgaggaagcggccctcgtcgtggaacgccggatcgcccgggccgtccgcgacggggcccgcctcgtcaccggcggcgagcgggacggggccctggtgcgtcccgccgtgctcgaccatgtgccgccggacaccgagctggtcaccgaggagaccttcggcccggtggcaccggtgatccgcgtccgcgacgcggacgaggcggtacgcctgtccaacggcaccgcgtacggcctgcaggccggagtcctcacccgggacagcgccgccttctgggacatcgccgcccggctgcgggtcggcgcggtgaacctcggcgaagggccccacttcgactccccgcacatcccgttcggcggtgtgaagtccagcggagtcggccgggagggcatccgctacgccatcgccgagatgaccgtcaccaagacggtcacccttcccggcccctacggaaccggctga

SEQ ID NO: 360 - protein, 466 aa, Streptomyces viridochromogenes
MFVNGALQPARRHTTVHDRWTGEPVGTVPRDGAEEAAAAVAALAAGRRATTPQQRSAVLTRAADMLTARAEEFSTLITAESGVCRKETLREVSRAAGNLRVAAAEAERIRGESIPLPDGTRLAVTLPEPVGVVLGITPFNRPLNQVVVKAAPALAAGCPLLLKPSEKTPLTALAFAELLVEAGCAKDMLAVVTGEPGEVGPPLAAHPDVAMVTFTGSVATGHAVAAQAAGKRQLLELGGNDPLFVLPDADLRRAAKLAADGSCATAGQSCRGIKRVFVWEEVADEFTALLEPAVAAKRAGDPRREDTDLGPLVSEEAALVVERRIARAVRDGARLVTGGERDGALVRPAVLDHVPPDTELVTEETFGPVAPVIRVRDADEAVRLSNGTAYGLQAGVLTRDSAAFWDIAARLRVGAVNLGEGPHFDSPHIPFGGVKSSGVGREGIRYAIAEMTVTKTVTLPGPYGTG

SEQ ID NO: 361 - DNA, 1704 bp, Leymus chinensis
  CDS (45)..(1553)
ttcgcaccccgcaccaacccccacacagctcactacccgcccagatggcctcgccggcgattccgcagcggcagctcttcatcgacggcgagtggcgtgcccccgcgctcggccgccgccttcccgtcatcaacccgaccacagaggcctccatcggcgagatcccgtcaggcacctcggaggacgtggacgcggcggtggcggccgcgcgggcggctctgaagaggaaccgcggccgcgactggtcccgcgcccccggcgccgtccgggccaagtacctccgcgcaattgccgccaagatgattgagcggaaagccgacctggctaggctagaggcacttgattgcgggaagcctcttgatgaagcggcatgggacatggatgatgttgctggctgctttgagttcttcgcaggccatgccgaagccttggacaaaaggcaaaatgctgcagtttctctcccggagaattttaaatgccatcttaagaaggaacccattggtgtagttagtctaatcacaccttggaactatcctctcttgatggctacatggaaagtagcccctgctctggcagctggttgtacagctgtactgaaaccatctgaattagcttcagtgacttgcttagagcttgctgatgtgtgtaaagaggttggtcttccaccaggtgtcttaaacgttgttactggattaggtcctgaagctggtgctcctttgtcgtcacaccctgacgtcgacaaggttgcatttaccgggagctatgcaacgggtcaaaagattatggttgctgcagctcctacggtcaaggctgttacattggaacttggtggcaaaagtcctattgtagtatttgatgatgtcgacattgacaaagctgttgagtggactctatttgggtgcttttggaccaatggtcagatttgcagtgcgacatctcgtcttcttatccataaaaatatcgctaaagaattcgtcgacaggatggttgcatggtccaaaaatatcaaggtgtcagatccgctcgaggagggttgcaggcttgggccagttgttagtgaaggacagtatgagaagattaagaagttcatatcaaatgctaaaagtgaaggtgccaccattctgaccgggggtgttaggcccaagcatatggagaaaggtttctttatcgaacccacaatcatcaccgatatcaacacatcaatggagatttggagggaggaagtctttggtccagtcctgtgtgtgaaggaattttctaccgaagaggaagccatcgaactggccaatgatactcattatggtttggctggtgccgttatctccggtgaccgggagcgatgccagagattagctgaggagatcgacgcgggatgcatctgggtgaactgctcgcagccttgcttctgccaagctccatggggcgggaacaagcgcagcggctttgggcgcgagctcggagaaggggggatcgataactacctgagcatcaagcaagtcacggagtacacatctgatgcgccgtggggatggtacaaagctccggctaactaagatgtaattgagctggctcgaggacttgtatctgttccatcaggataaatctgtgcgccggcctttgtagtggtgagaataaatgtaatttgccatgtactgctgaatctttcttgcaaaataaatggcatgagttttgttgacaaaaaaa

SEQ ID NO: 362 - protein, 502 aa, Leymus chinensis
MASPAIPQRQLFIDGEWRAPALGRRLPVINPTTEASIGEIPSGTSEDVDAAVAAARAALKRNRGRDWSRAPGAVRAKYLRAIAAKMIERKADLARLEALDCGKPLDEAAWDMDDVAGCFEFFAGHAEALDKRQNAAVSLPENFKCHLKKEPIGVVSLITPWNYPLLMATWKVAPALAAGCTAVLKPSELASVTCLELADVCKEVGLPPGVLNVVTGLGPEAGAPLSSHPDVDKVAFTGSYATGQKIMVAAAPTVKAVTLELGGKSPIVVFDDVDIDKAVEWTLFGCFWTNGQICSATSRLLIHKNIAKEFVDRMVAWSKNIKVSDPLEEGCRLGPVVSEGQYEKIKKFISNAKSEGATILTGGVRPKHMEKGFFIEPTIITDINTSMEIWREEVFGPVLCVKEFSTEEEAIELANDTHYGLAGAVISGDRERCQRLAEEIDAGCIWVNCSQPCFCQAPWGGNKRSGFGRELGEGGIDNYLSIKQVTEYTSDAPWGWYKAPAN

SEQ ID NO: 363 - DNA, 1729 bp, Chorispora bungeana
  CDS (64)..(1572)
gatccaccatctccagagcgagagaggacgagagaaagagaggctgtagattcagataagacaatggcgattccgatgcctactcgtcagctattcatcgacggtgaatggagagagcccatcttgaagaagcgaatcccgatcgtcaatccggctaccgaagaggtcattggtgatatccccgctgctacaacggaggatgtcgaagttgcagtcaacgctgctcgaagagctttttcaaggaataaagggaaagattgggccaaagcaccaggagctcttcgtgcaaagcatctacgagctattgctgctaaggtaactgaaagaaagtcggatctggcaaagcttgaggcgcttgattgtggtaaaccattggatgaagcagtctgggatatggaagatgtcgctggatgttttgaattttatgctgaccttgctgaaggattagatgccaagcagaaagcaccggtctcgcttcccatggagaattttaagagttatgttctgaagcaacctattggagttgtgggactgattacaccatggaattacccacttttgatggctgtttggaaggtggctccttcacttgctgcaggatgcactgcgattctcaagccatcagagctggcatcagtcacttgtttggagcttgctgatatttgtcgagaagtcggtcttcctcctggggtcctcaatgttctgactggatatggtgcggaagctggtggtcctttggcatcacatcccggtgtggacaagattgcatttactggaagttttgccacgggaagcaaggtcatgacagctgctgctcagttggtgaagcctgtttcaatggaactcggtgggaagagccctctcattgtgtttgatgacgttgatcttgataaagctgctgaatgggctctcttcggttgcttctggacaaatggtcagatctgcagtgcaacttcccgccttcttgtccatgaaaacattgcacctcaatttatagaaaagcttgtaaaatggagcaagaacattaaaatatcagaccccatggaagagggatgcaggcttggtcctgtcgttagtcaaggacagtacgagaaaatattgaaatttatctcaacggctaaaagtgaaggtgcaacgatcttgcatggtggttcccgacctgagcatcaggaaaagggcttctttattgaaccaaccatcataactgatgtaaccacttcaatgcaaatctggagagaagaagttttcgggcctgttctttgcgtgaaaacatttggcagtgaggatgaggcaattgagctagcaaatgactcccattacggattaggagctgcagtgatatctaatgatacggaaagatgtgaccgtgtcagccaggcctttgaagctgggattgtatggattaactgctcacagccttgctttactcaagctccatggggtggagtcaaacgcagtggatttggacgcgaactaggagaatggggacttgataactacttgagtgtgaagcaagtgactctctacacttcaaacgaaccgtggggatggtacaaatccccctctgcttaagtaatgaaaaccaatagctgtctcttccatctttgtgcctttatcaatttgtcaagtttggtcctgaaactctctatttgtaaaacctttggagataagaacaataatgaataaaatgaaaagatggtttggtgaaaaaaaaaaaaaaaaaaaaaaa

SEQ ID NO: 364 - protein, 502 aa, Chorispora bungeana
MAIPMPTRQLFIDGEWREPILKKRIPIVNPATEEVIGDIPAATTEDVEVAVNAARRAFSRNKGKDWAKAPGALRAKHLRAIAAKVTERKSDLAKLEALDCGKPLDEAVWDMEDVAGCFEFYADLAEGLDAKQKAPVSLPMENFKSYVLKQPIGVVGLITPWNYPLLMAVWKVAPSLAAGCTAILKPSELASVTCLELADICREVGLPPGVLNVLTGYGAEAGGPLASHPGVDKIAFTGSFATGSKVMTAAAQLVKPVSMELGGKSPLIVFDDVDLDKAAEWALFGCFWTNGQICSATSRLLVHENIAPQFIEKLVKWSKNIKISDPMEEGCRLGPVVSQGQYEKILKFISTAKSEGATILHGGSRPEHQEKGFFIEPTIITDVTTSMQIWREEVFGPVLCVKTFGSEDEAIELANDSHYGLGAAVISNDTERCDRVSQAFEAGIVWINCSQPCFTQAPWGGVKRSGFGRELGEWGLDNYLSVKQVTLYTSNEPWGWYKSPSA

SEQ ID NO: 365 - DNA, 1892 bp, Zoysia tenuifolia
  CDS (123)..(1646)
cgcggccccgcgcacgcagcgcaccacgccactttcccactcccactttcgccgcgccgcggggagactcgccgttcgttcgttcgagactccgatccccgccgtcgactccgcggaagcacatggccgcggcgccgcgggacgtcccccgccggggcctcttcatcggcggggggtggagggagccgtccctcgggcggcgtctcccggtcgtcaacccggccaccgaaaccaccatcggtgacgtcccggcggccacggcggaggacgtggagctcgcggtcgcagcggcgcgggaagccttcaggcgcgacggcggaaggcactggtcgtgcgcctctggggccgtgcgggccaagttcctcagggcgatcgccgccaagattaaagaaaaaaaatccgatctagctttgctggagacactggattctgggaagcctctggatgaagcaaatgcagacatggacgatgttgcagcatgcttcgagtattatgctgatctggcagaagcttttgatgggaaacaacgtttgccaatctcgctgccaatggaaaatttcaagtcatatgcgctcaaagaaccgattggggttgttggactgatcaccccatggaactatcccctgttgatggcgacgtggaaggttgcacctgccttagctgctggttgtacagctgtgttaaagccatcggagttggcttctctgacttgcttggagctaggtgcaatatgcatagagataggcctacctccaggtgtcttgaacataattactggtctgggtcctgaagctggtgctccattagcctcacacccccatgtggataaggttgcttttactggaagcacagagactggtaagagggtaatgactgctgctgctcaaatggttaagcctgtttcattagagcttggaggcaaaagtccgcttattgtctttgatgacatagacaacattgataatgctgttgaatgggccatgttcgggattttcgcaaatggtggtcaagtctgcagtgcaacttctcgtatacttgtgcatgagaaaattgcaaaacaattcttggatagattggttgcatgggcgaagcacatcaaaatctcagatccactggaggaaggttgcaggctggggtcggttgtcagtgaagggcagtacgaaaagataaagaaattcatctcaactgcaagaaatgaaggtgcgaccattttgtatggaggtgcacgaccacaacacctcagaagagggttctttattgaacctacaatcataacagatgttagtacgtcaatgcaaatttggcgagaggaagtctttggtccagtcgtctgtgtaaaagaattcagtacagagagtgaagctgtggagcttgcaaatgatacccactatggtctagctggtggcgtgatttctaatgatccagagatctgtgagcgccttacaaaggctattcaagctggtattatttggataaattgctctcaaccatgcttcgttcaagctccatggggagggaacaagcggagtggttttggtcgtgagctcggagagtggggccttgataactacatgaccgtgaagcaagtcaccaagtattgctcggatgaaccatggggatggtaccagcctccatcgaagctgtaacgagtcattcatgccaggaaaatggagagcttcatttaactaagacataactatgaattgtctatccttccaaaaaataactgtgaaatgtctattaggagtaagtgcaacgacagagttatataccgtgctattgcaataaaaggacttaacggcagactcgtaatattgtttttggccaaggcataatatagtactactagtaatacaataaaccagtcttatatcaaaaaaaaaaaaaaaaaa

SEQ ID NO: 366 - protein, 507 aa, Zoysia tenuifolia
MAAAPRDVPRRGLFIGGGWREPSLGRRLPVVNPATETTIGDVPAATAEDVELAVAAAREAFRRDGGRHWSCASGAVRAKFLRAIAAKIKEKKSDLALLETLDSGKPLDEANADMDDVAACFEYYADLAEAFDGKQRLPISLPMENFKSYALKEPIGVVGLITPWNYPLLMATWKVAPALAAGCTAVLKPSELASLTCLELGAICIEIGLPPGVLNIITGLGPEAGAPLASHPHVDKVAFTGSTETGKRVMTAAAQMVKPVSLELGGKSPLIVFDDIDNIDNAVEWAMFGIFANGGQVCSATSRILVHEKIAKQFLDRLVAWAKHIKISDPLEEGCRLGSVVSEGQYEKIKKFISTARNEGATILYGGARPQHLRRGFFIEPTIITDVSTSMQIWREEVFGPVVCVKEFSTESEAVELANDTHYGLAGGVISNDPEICERLTKAIQAGIIWINCSQPCFVQAPWGGNKRSGFGRELGEWGLDNYMTVKQVTKYCSDEPWGWYQPPSKL

SEQ ID NO: 367 - DNA, 1818 bp, Zoysia tenuifolia
  CDS (24)..(1538)
cagtgcccagccactcctccccgatggcctcaccagcggcgatcccgcagcggcagctcttcatcgacggcgagtggcgcgcgccggcgctcggccgccgcatccccgtcgtcaacccctccacggaggcccacatcggcgaggtcccggccggcacggcggaggacatcgacgcggcggtgaaggccgcgcgggcggcgctgaagaggaaccgcggacgagactgggcccgcgcgccgggggccgtccgggccaagtacctccgcgccatcgccgccaagataactgagaggaagcctgagctggctaagctagaggcacttgattgtgggaagccttatgacgaagcaacatgggacatggatgatgttgctgggtgtttcgagttcttcgcaggtctggcagaagccttggacaaaaaacaaaataccccagtctctcttccagagaattttaaatgccatcttcggagagaacctattggtgtagttggtcttatcacaccttggaactatcctctcctgatggccacatggaaggttgcccctgctctggctgctggttgtacagctgtgctaaagccatctgaattggcttcagtgacttgcttagagttggctgatgtctgtaaagaagttggtcttccttcaggtgttttaaacatcgtgactggattaggccctgatgccggtgctccattggcagcacacccagatgttgacaaggtttcctttactgggagttcagcgactggtcaaaaaattatgactgctgcagctacaatggtcaagcctgtttcactggaacttggtggaaaaagtcctatagtaatatttgatgatgttgacattgacaaagctgttgaatggactctgtttgggtgcttttggaccaatggtcagatttgcagcgcaacatctcgtcttcttatccataaaaaaattgctaaagagttcattgagaggatggttgcatgggccaaaaatatcaaggtgtcagatccacttgaagagggttgcaggcttggacctgttgttagtgagggtcagtatgagaagattaagaagtttgtagcgaatgctaaaaacgaaggtgctactattctgactgggggcgttagaccaaagcatcttgagaaaggatactatatcgaacccacgatcattacagatgtcagcacatccatggaaatttggagggaggaggtctttggtccagtcctctgtgtcaaggactttagtaccgaagatgaagctattgaattggcaaatgatactcattatggtttggccggtgctgtactttctgctgaccgtgagcgctgccagagagtagctgaggagattgacgcaggagccatttgggtgaactgctcgcagccctgcttctgccaagctccttggggtgggaacaaacgcagcggattcggtcgtgagctcggagatgggggcctagacatctacctaaacgtcaagcagatcacggagtacacctctgacgagccgtggggctggtacaagccgccgtccaagatctaagaaaagtgggcgcaagaatttcatctcggttccattggaataagtggacgtaccacacggaaccgacctgtgcattacagtagacagaggaaaattgtgctgtgctgtattgtacgcttgtaccatgtgctgaagtcgtgttgaaagacttctctggtctgtttgtcatagcttatttttagtttatttataaatataaacaaaagctgtgtaaaacagtaaatttattttacagcttattagttcagtagctttttaaaataaaaaaaaaaaaaaaaaa

SEQ ID NO: 368 - protein, 504 aa, Zoysia tenuifolia
MASPAAIPQRQLFIDGEWRAPALGRRIPVVNPSTEAHIGEVPAGTAEDIDAAVKAARAALKRNRGRDWARAPGAVRAKYLRAIAAKITERKPELAKLEALDCGKPYDEATWDMDDVAGCFEFFAGLAEALDKKQNTPVSLPENFKCHLRREPIGVVGLITPWNYPLLMATWKVAPALAAGCTAVLKPSELASVTCLELADVCKEVGLPSGVLNIVTGLGPDAGAPLAAHPDVDKVSFTGSSATGQKIMTAAATMVKPVSLELGGKSPIVIFDDVDIDKAVEWTLFGCFWTNGQICSATSRLLIHKKIAKEFIERMVAWAKNIKVSDPLEEGCRLGPVVSEGQYEKIKKFVANAKNEGATILTGGVRPKHLEKGYYIEPTIITDVSTSMEIWREEVFGPVLCVKDFSTEDEAIELANDTHYGLAGAVLSADRERCQRVAEEIDAGAIWVNCSQPCFCQAPWGGNKRSGFGRELGDGGLDIYLNVKQITEYTSDEPWGWYKPPSKI

SEQ ID NO: 369 - DNA, 1871 bp, Zoysia tenuifolia
  CDS (119)..(1642)
cctcgtgccgaattcggcacgaggccactttcccactcccactttcgccgcgccgcggggagactcgccgttcgttcgttcgagactccgatccccgccgtcgactccgcggaagcacatggccgcggcgccgcgggacgtcccccgccggggcctcttcatcggcggggggtggagggagccgtccctcgggcggcgtctcccggtcgtcaacccggccaccgaaaccaccatcggtgacgtcccggcggccacggcggaggacgtggagctcgcggtcgcagcggcgcgggaagccttcaggcgcgacggcggaaggcactggtcgtgcgcctctggggccgtgcgggccaagttcctcagggcgatcgccgccaagattaaagaaaaaaaatccgatctagctttgctggagacactggattctgggaagcctctggatgaagcaaatgcagacatggacgatgttgcagcatgcttcgagtattatgctgatctggcagaagcttttgatgggaaacaacatttgccaatctcgctgccaatggaaaatttcaagtcatatgcgctcaaagaaccgattggggttgttggactgatcaccccatggaactatcccctgttgatggcgacgtggaaggttgcacctgccttagctgctggttgtacagctgtgttaaagccatcggagttggcttctctgacttgcttggagctaggtgcaatatgcatagagataggcctacctccaggtgtcttgaacataattactggtctgggtcctgaagctggtgctccattagcctcacacccccatgtggataaggttgcttttactggaagcacagagactggtaagagggtaatgactgctgctgctcaaatggttaagcctgtttcattagagcttggaggcaaaagtccgcttattgtctttgatgacatagacaacattgataatgctgttgaatgggccatgttcgggattttcgcaaatggtggtcaagtctgcagtgcaacttctcgtatacttgtgcatgagaaaattgcaaaacaattcttggatagattggttgcatgggcgaagcacatcaaaatctcagatccactggaggaaggttgcaggctggggtcggttgtcagtgaagggcagtacgaaaagataaagaaattcatctcaactgcaagaaatgaaggtgcgaccattttgtgtggaggtgcacgaccacaacacctcagaagagggttctttattgaacctacaatcataacagatgttagtacgtcaatgcaaatttggcgagaggaagtctttggtccagtcgtctgtgtaaaagaattcagtacagagagtgaagctgtggagcttgcaaatgatacccactatggtctagctggtggcgtgatttctaatgatccagagatctgtgagcgccttacaaaggctattcaagctggtattatttggataaattgctctcaaccatgcttcgttcaagctccatggggagggaacaagcggagtggttttggtcgtgagctcggagagtggggccttgataactacatgaccgtgaagcaagtcaccaagtattgctcggatgaaccatggggatggtaccagcctccatcgaagctgtaacgagtcattcatgccaggaaaatggagagcttcatttaactaagacataactatgaattgtctatccttccaaaaaataactgtgaaatgtctattaggagtaagtgcaacgacagagttatataccgtgctattgcaataaaaggacttaacggcagactcgtaatattgtttttggccaaggcataatatagtactactagtaatacaataaaaaaaaaaaaaaaaa

SEQ ID NO: 370 - protein, 507 aa, Zoysia tenuifolia
MAAAPRDVPRRGLFIGGGWREPSLGRRLPVVNPATETTIGDVPAATAEDVELAVAAAREAFRRDGGRHWSCASGAVRAKFLRAIAAKIKEKKSDLALLETLDSGKPLDEANADMDDVAACFEYYADLAEAFDGKQHLPISLPMENFKSYALKEPIGVVGLITPWNYPLLMATWKVAPALAAGCTAVLKPSELASLTCLELGAICIEIGLPPGVLNIITGLGPEAGAPLASHPHVDKVAFTGSTETGKRVMTAAAQMVKPVSLELGGKSPLIVFDDIDNIDNAVEWAMFGIFANGGQVCSATSRILVHEKIAKQFLDRLVAWAKHIKISDPLEEGCRLGSVVSEGQYEKIKKFISTARNEGATILCGGARPQHLRRGFFIEPTIITDVSTSMQIWREEVFGPVVCVKEFSTESEAVELANDTHYGLAGGVISNDPEICERLTKAIQAGIIWINCSQPCFVQAPWGGNKRSGFGRELGEWGLDNYMTVKQVTKYCSDEPWGWYQPPSKL

SEQ ID NO: 371 - DNA, 1858 bp, Panax ginseng
  CDS (44)..(1555)
agaaagtagggtaattgattaatcaagggagtgataggtgagaatggcgataagaataccaactcggcagctcttcatcgatggagagtggagagaacctgctaagaagaatcgtatcgctatcatcaaccccgctaccgaacagatcatcgggaatataccggcagctacatctgaggacgtagatattgctgtggaagctgctcgaagagcccttgctcggaatggagggagcgactgggcctcggcctctggagcatatcgtgcaaagtatttgcgggctattgctgcaaagataacagagagaaaatctgaactggcaaagcttgaaaccttagattgtggaaaaccattggaagaagcagcgtgggatattgatgatgtcgctgcatgttttgagtacaatgcagatcttgcagaagctttggatggaaagcaaaagtcccctatttctcttcctatggagacatttaagtcttacattcttaaggaacccattggtgttgtaggtttgattactccatggaattaccctatgctgatggctacgtggaaagtagctcctgctctggctgctggctgtgctgcaatacttaaaccatctgaattggcatctgttacctgtttggagttgggtgaagtgtgtaaagaggttggtcttcctccaggcattcttaatatcttgactgggttaggcccagaagctggtgctcctttggcatcacatcctcatgttgacaagattgcatttactggaagtactgcaacaggaagcaagatcatgactgctgcagcacagcaagtaaagcctgttacactcgaacttggtggaaaaagtcctattttggtgtttgaggatgttgatctcgataaagctgctgagtggactatttttggttgcttttggacaaatggtcaaatttgtagtgcaacctcgcgtcttctagtgcatgaaagcattgcagcagaattcttagacaagcttatgaagtggaccaaaaatattaagatttcagaccccttagaggaaggttgcaggcttgggcctgttgttagtggcggacagtatgagaaggtaatggagtccatctcgacagctaagaaagaaggagcaactatcttgtgtggtggggcaaggcctaagcatttggagaaaggattctttattgagccaactattataagcgatgtaactacctcgatgcaaatttggagggaggaggtttttggaccagttctctgtgttaaaacatttagaaccgaggatgaagctattgaacttgcaaatgacactcgttacggcttgggcggtgctgtaatatctaatgatctggaaaggtgtgagcgtgtaacaaaggctcttcaatcagggattgtctggatcaactgctcccagccgtgcttctgtcaagctccatggggtgggaaaaagcgtagtggttttgggcgtgaactaggagaatggggacttgataactacttaagtgtgaagcaggtcacacagtatgtttctgatgaaccatggggatggtatcaatctccatcaaagctctaaagtttctccgaagccaggggtaaaaaaggcgctctaaacaggaatagtaaggcttaattgctgtatgttcctttgttcgagcggttgtaatttcccttgcctggaacaacagctgtaatagtccaacttaccaacaatataaggatatgtagaataaggcatcattaagttaaggtgtctcatttttatgttcttgtgatcttaaaaattgtatgaatattgagtttcattaaaaatgtgagtggttctgttgagttgagaaataaatttgttccagaaaaaaaaaaaaaaaaaaaaaaaaaa

SEQ ID NO: 372 - protein, 503 aa, Panax ginseng
MAIRIPTRQLFIDGEWREPAKKNRIAIINPATEQIIGNIPAATSEDVDIAVEAARRALARNGGSDWASASGAYRAKYLRAIAAKITERKSELAKLETLDCGKPLEEAAWDIDDVAACFEYNADLAEALDGKQKSPISLPMETFKSYILKEPIGVVGLITPWNYPMLMATWKVAPALAAGCAAILKPSELASVTCLELGEVCKEVGLPPGILNILTGLGPEAGAPLASHPHVDKIAFTGSTATGSKIMTAAAQQVKPVTLELGGKSPILVFEDVDLDKAAEWTIFGCFWTNGQICSATSRLLVHESIAAEFLDKLMKWTKNIKISDPLEEGCRLGPVVSGGQYEKVMESISTAKKEGATILCGGARPKHLEKGFFIEPTIISDVTTSMQIWREEVFGPVLCVKTFRTEDEAIELANDTRYGLGGAVISNDLERCERVTKALQSGIVWINCSQPCFCQAPWGGKKRSGFGRELGEWGLDNYLSVKQVTQYVSDEPWGWYQSPSKL

SEQ ID NO: 373 - DNA, 1834 bp, Gossypium hirsutum
  CDS (31)..(1542)
gggaagtgaaactaaaataactgagttaatatggcggtccaagttccgagtcgacaattattcatcgatggcgagtggagagagcccattctcaaggagcgactcccaaccatcaatcctgctactgaagagatcatcggtaacattccagcggctacagctgaagacgtggagcttgcggtggcggctgctcggagagctctttctagaaacaaaggtaaggattgggctaccgctcctggcgctgtccgtgccaagtatttacgtgccatcgctgctaaggtaacagagagaaaaactgagttggctaagcttgaagcaattgattgtgggaaacctcttgatgaagcagtttgggacattgaagatgttgctggatgttttgagtactatgcagaccttgctgaaggcttagatgcaaggcaaaaggctcctgtctctcttcctatggagacatttaagagttatgtgcttaaggaaccaattggggttgttggattgattactccatggaattacccattattaatggctacatggaaagtagctccttccttggctgctggttgtgctgcaatactgaaaccttcggagttggcatctatcacctgcttggagctggcgaaagtggtgaagggaagtcgtcttcctcctggtgtcctgaacattctggctgggctgggccctgaagctggcgctcctttggcatctcatccagatgttgacaagattgcctttactggaagcagtgcaacagggagcaagataatggcagcagctgctcaaatggtgaagcctgtttctttagagcttggtgggaaaagcccaattattgtgtttgaggatgttgacctcgacaaagctgctgaatggactgcatttggttgcttctggacaaatggacagatttgcagtgcaacatcccgtcttattgtacacgaaaacattgcgagagaatttctggacaggcttgtgaaatggactaaaaacattaagatttctgatccctttgaagaaggatgcaggcttggccccgttgttagtggaggacagtatgagaaagtattgaaattcatctcaactgctaagagtgaaggtgctaccattttgagtggtggagttcgtcctgagcatttaaagaagggattttttgttgaaccaactataataactgatgtgacaacttccatgcaaatctggagagaagaagtttttggacctgttctttgtgtcaagacatttaggacagaagaggaagcccttgaactggcaaatgacacccattatggtttgggtgctgccgtgatatcaaatgacctggaaagatgtgatcgtgtaagcaagaatctccaagctggaattgtgtgggtcaattgttcacagccatgcttctgtcaagctccatggggaggcaataaacgcagtggctttgggcgtgaacttggggaatggggtctcgacaattacttgagtgtgaagcaggtcacgcagtatgtctccgatgaaccatgggggtggtatcgctcaccatcaaagctgtgagagtattgggggctgttcgaataaataaaccatcgaggacataaggtaagatccattgaagagtattttatgagaggattggcatgtagtgaggtgattaaagagaaggcaggattatcgttcatagaactcaaatatgagacagactccaacatctatgcatcaagtctactgcaccttgtttttcaaaatatacatatgcatacctatgcatgtatgaatgtattatggtttgtgatctatgagatgaatggattagtttattgaaaaaaaaaaaaaaaaaaaaaaaaaa

SEQ ID NO: 374 - protein, 503 aa, Gossypium hirsutum
MAVQVPSRQLFIDGEWREPILKERLPTINPATEEIIGNIPAATAEDVELAVAAARRALSRNKGKDWATAPGAVRAKYLRAIAAKVTERKTELAKLEAIDCGKPLDEAVWDIEDVAGCFEYYADLAEGLDARQKAPVSLPMETFKSYVLKEPIGVVGLITPWNYPLLMATWKVAPSLAAGCAAILKPSELASITCLELAKVVKGSRLPPGVLNILAGLGPEAGAPLASHPDVDKIAFTGSSATGSKIMAAAAQMVKPVSLELGGKSPIIVFEDVDLDKAAEWTAFGCFWTNGQICSATSRLIVHENIAREFLDRLVKWTKNIKISDPFEEGCRLGPVVSGGQYEKVLKFISTAKSEGATILSGGVRPEHLKKGFFVEPTIITDVTTSMQIWREEVFGPVLCVKTFRTEEEALELANDTHYGLGAAVISNDLERCDRVSKNLQAGIVWVNCSQPCFCQAPWGGNKRSGFGRELGEWGLDNYLSVKQVTQYVSDEPWGWYRSPSKL

SEQ ID NO: 375 - DNA, 1743 bp, Brassica napus
  CDS (35)..(1546)
gatgacttaccaacgcaaaagaaacaagcagagtatggcgattacggtgccgcgacggcagctcttcatcggcggtcaatggacagagccccttcgccgtcaaacactccctgttgtcaatcccgccacggaggacatcatcggttacatcccagctgcaacttctgaggatgtggaactcgcggtggaagctgctaggaaagcacttacaagaaacaaaggaaatgattggtctaaagcatccggggctgttcgtgccagatacttacgtgctattgcagctaaggtaacggagaggaaatctgaactagctaatcttgaggctattgactgcggtaaacctctagatgaagcagcatgggatatggatgatgttgctggatgttttgaatattatgctgacctagctcaaggcttagattcaaagcagaaggctcctctttctcttcccttagatacttttaagggctacgttctcaaggaacccattggtgtagttggcctgattactccatggaattatccgttactgatggctgtttggaaagtcgctcctgcacttgccgctgggtgcacggcaatactgaaaccttctgagttggcctccgtgacatgtttggagctcgctgatatctgccgcgaggtgggtctgccacctggtgttcttaatattctgactggtttaggaactgaagcaggtgctccattggcatcgcatccacacgttgacaagattgttttcactggaagcacggcaactggaagcaacattatgacttctgctgccaaattggttaaacctgtttccttggagcttggtgggaaaagccctatcattgtctttgatgatgtcaaaattgacaaagctgtggaatggactatgtttggttgtttctggacaaacggtcagatttgcagtgcgacatctcgacttctcgtgcatgaaaagattgctgacgaatttttggacaagttggtaaagtggacaaagaacattaagatttcagatccttttgaagaaggctgtaggcttggtcctgttgtcagcaaaggacagtacgagagagtagtgaagtttgtctcaaacgctaggaaggaaggtgcaactgtcctctgcggaggagctcgtcctgggcatttaaaaaagggttattttgttgaacctgctataatttcaaatgtgactacttcaatggaaatctggagagatgaagtatttggtcctgttctctgtgtcaaaacattctccactgaggatgaggcaatacagctggcaaatgactcccaatatggattagcaggcgctgtattatcaaatgatctggagaggtgtgatcgcgttagtaaggcattcgaggcgggtattgtgtgggtcaactgttctcagccatgtttctgtcaagctccatggggtggaaccaaacgcagtggttttggccgtgaactaggagaatggggacttgagaactacttgagtgtgaagcaggtgacgcaatatatatctaatgaaccatggggatggtacaagtctccttccaagctttaagtcaaaacactatacttcttgatgtttcctttaaagatgtaatataccaacctgggttttaaattgcgtgtggcgagccaatgcgattaggggctcgactctcgccaagcgccatggcgaggcaagtcgatcgccatgtgcaacacatttaaaacagtgtgtttttatttatttataactacatgttatgacatggc

SEQ ID NO: 376 - protein, 503 aa, Brassica napus
MAITVPRRQLFIGGQWTEPLRRQTLPVVNPATEDIIGYIPAATSEDVELAVEAARKALTRNKGNDWSKASGAVRARYLRAIAAKVTERKSELANLEAIDCGKPLDEAAWDMDDVAGCFEYYADLAQGLDSKQKAPLSLPLDTFKGYVLKEPIGVVGLITPWNYPLLMAVWKVAPALAAGCTAILKPSELASVTCLELADICREVGLPPGVLNILTGLGTEAGAPLASHPHVDKIVFTGSTATGSNIMTSAAKLVKPVSLELGGKSPIIVFDDVKIDKAVEWTMFGCFWTNGQICSATSRLLVHEKIADEFLDKLVKWTKNIKISDPFEEGCRLGPVVSKGQYERVVKFVSNARKEGATVLCGGARPGHLKKGYFVEPAIISNVTTSMEIWRDEVFGPVLCVKTFSTEDEAIQLANDSQYGLAGAVLSNDLERCDRVSKAFEAGIVWVNCSQPCFCQAPWGGTKRSGFGRELGEWGLENYLSVKQVTQYISNEPWGWYKSPSKL

SEQ ID NO: 377 - DNA, 1776 bp, Hordeum brevisubulatum
  CDS (85)..(1602)
cgaagccaccgcgagccgaccgtcgaccagccctgaaggcgccctcctcggcggcagcagtagcatcctccgccctcaccagccatggccgcgcccccagcgatcccgcgccgcggcctcttcattggcggcgggtggcgcgagcccaccctgggccgccacatccccgtcatcaacccggccaccgaggccaccatcggcgacatcccggcagccacggcggaggacgtggagctcgccgtcgcggccggcggtccggttcttgctcgacggcgggagcactgggcgcgcgcatctggggccgtgcgtgccaagtatctgaacgcgatcgccgctaagattaaagaaaagatatcgtatctggcattgttggagacagttgattctggaaagcccaaggacgaagcagttgcggacatggacgatgtcgctgcatgctttgaatactatgctggtctggctgaagccttagatgggaaacaacatgcaccaatctctctgcccatggaagaattcaagacctatgttcttaaagaacccatcggggttgttggactcatcactccctggaactatcctctgttgatggctacttggaaggttgcacctgccctggctgcagggtgtacagctgtgttaaagccatctgagctggcttctctaacttgtttagagctcggcgcaatatgtgaagagataggactgccttcaggagttctgaacataattactggtctgggccctgatgcaggtgctccaatagcttcacatccccatgtggataagattgcttttactggaagtactgcaactggtaagatgataatgaccgctgctgcccaaatggttaagcctgtttcattagagcttggtggcaaaagtcctcttgttatctttgatgatgttgctgacattgacaaagctgttgaatgggccatgtttggttgttttttcaatggcggtcgagtttgcagtgcaacttctcgtctacttctccatgagaaaattgctgcgcgatttttagatagactagttgaatgggtaaaaaatatcaaaatctcagacccactggaagaaggttgcaggctgggttcagtcatcagtaaagggcagtatgagaagattaagaagttcatctcaacagcaagaagtgaaggtgctacaattttgcatgggggtgaccgaccaaagcatcttggaaaagggttctttattgaaccaacaattataacagacgttagcacgtcaatgcaaatttggagagaggaagtctttgggccagtcatctgtgtcaaagtatttaagacagagagtgaagctgtagagcttgcaaatgatacccactatggcttggctggtggtgtgatctctgataatctagagaggtgtgagcgcattgcaaaggttattcattctggcattgtctggataaactgctcgcaaccgaccctggttcaagctccgtggggagggaacaaacggagtggttttggccgggagctaggagaatggggcctcgagaactacctgagcgtgaagcaggtcaccaggtactgcaaagatgagctatacggttggtaccagcgtccatccaagctgtagatgacttgagatgaggcgtccatgtcatgagaatggagcctcattcactggaggacgagatgaatcctgatcttgtgcacggacggagacttctgtacagcgctttcgcaataatgccattgtatggcaaacttggttatgatagcgtgtcattgagccaaaaaaaaaaaaaaa

SEQ ID NO: 378 - protein, 505 aa, Hordeum brevisubulatum
MAAPPAIPRRGLFIGGGWREPTLGRHIPVINPATEATIGDIPAATAEDVELAVAAGGPVLARRREHWARASGAVRAKYLNAIAAKIKEKISYLALLETVDSGKPKDEAVADMDDVAACFEYYAGLAEALDGKQHAPISLPMEEFKTYVLKEPIGVVGLITPWNYPLLMATWKVAPALAAGCTAVLKPSELASLTCLELGAICEEIGLPSGVLNIITGLGPDAGAPIASHPHVDKIAFTGSTATGKMIMTAAAQMVKPVSLELGGKSPLVIFDDVADIDKAVEWAMFGCFFNGGRVCSATSRLLLHEKIAARFLDRLVEWVKNIKISDPLEEGCRLGSVISKGQYEKIKKFISTARSEGATILHGGDRPKHLGKGFFIEPTIITDVSTSMQIWREEVFGPVICVKVFKTESEAVELANDTHYGLAGGVISDNLERCERIAKVIHSGIVWINCSQPTLVQAPWGGNKRSGFGRELGEWGLENYLSVKQVTRYCKDELYGWYQRPSKL

SEQ ID NO: 379 - DNA, 1521 bp, Crocus sativus
  CDS (1)..(1521)
atggtgagcaccggatgtagcggcaatggtgcaaagggcaccaacggcggtatcgtggtaccggagatcaagttcaccaagcttttcatcaacggagaattcgtcgattccgtctccgggagcacatttgagacaagggacccacgcaatggcgacgttatagccaacatcgcagaaggagataaggaggacgtggatttggcggtgaaggcagccagagaagccttcgaccacggaaaatggcctagaatgtctggttatgaaagggggaggatcatgatgaagtttgcagatttgattgaagcattcatagaagaattggcagcacttgacaccttagatgcaggaaaactgctctctatgggtaaggctgtagacatcccagcagcagtacacatcatccgctactacgctggagcagcagacaagatacatgggtatacactaaagttgtcgagcgagttgcaaggatacacattaaaggagcctatcggcgtcgtcggcgtgatcatcccctggaacttccccaccacaatgttcttcctcaaggttagccccgctctcgccgccggctgcactatggtcgtcaagcccgccgagcagacacccctctccgctctgtactacgctcacctcgctaagctggctggagtgccggatggagtgatcaacgtcgttccgggattcgggccgacagcgggcgcagcgctctcctcccacatggatgtcgacagtgttgctttcactggatctgctgaaatcggccgtgcgatcatggagtcggcggcgaagagcaacctgaagaatgtgtctcctgagctcggcggcaagtccccgatgatagtcttcgacgacgccgatgtcgacatggctgtcagtctgaactcccttgcagttttcttcaacaagggagaggtgtgcgtggcgggctcgcgcgtttacgtgcaggaagggatctatgacgaattcgtgaagagggccgtggaagccgcgaggagctggaaggttggagacccgttcgatcagagcaggaacatgggccctcaggttgataaggaccagtttgagagcgtcctaaagtacattgagcatggcaagagtgagggggcgactctgctcaccggcggcaagcctgccgccgacaaggggtattacattgagcccaccatctttgtcgatgtcactgaagacatgaagatcgcgcaggaggaaattttcggaccagttatgtcactgatgaaattcaagacggttgaggaagggatcgactgtgcaaacaacacgaaatacggacttgcagcaggaatactaagccaagacttggacttgataaacacggtttcgaggtcaatcaaagctggaatcatttgggtcaattgctacttcgggtttgatcttgattgtccttatggtggctacaagatgagtggtaattgtcgtgagagtggcatggatgctctcgataactatctacaaaccaaatccgtcgttatgcctcttcacaattccccttggttgtag

SEQ ID NO: 380 - protein, 506 aa, Crocus sativus
MVSTGCSGNGAKGTNGGIVVPEIKFTKLFINGEFVDSVSGSTFETRDPRNGDVIANIAEGDKEDVDLAVKAAREAFDHGKWPRMSGYERGRIMMKFADLIEAFIEELAALDTLDAGKLLSMGKAVDIPAAVHIIRYYAGAADKIHGYTLKLSSELQGYTLKEPIGVVGVIIPWNFPTTMFFLKVSPALAAGCTMVVKPAEQTPLSALYYAHLAKLAGVPDGVINVVPGFGPTAGAALSSHMDVDSVAFTGSAEIGRAIMESAAKSNLKNVSPELGGKSPMIVFDDADVDMAVSLNSLAVFFNKGEVCVAGSRVYVQEGIYDEFVKRAVEAARSWKVGDPFDQSRNMGPQVDKDQFESVLKYIEHGKSEGATLLTGGKPAADKGYYIEPTIFVDVTEDMKIAQEEIFGPVMSLMKFKTVEEGIDCANNTKYGLAAGILSQDLDLINTVSRSIKAGIIWVNCYFGFDLDCPYGGYKMSGNCRESGMDALDNYLQTKSVVMPLHNSPWL

SEQ ID NO: 381 - DNA, 1548 bp, Bixa orellana
  CDS (1)..(1515)
atggagagcaccggacgcgcaccactgggaaatggtaggataggtaatcctggaggtctcgtggtacccgaaattaagtttaccaaactatttatcaacggaagattcgtcgataacgtctccgggcagacatttgacacaagggacccacgcactggcgacgttctagccaccatcgcagaagcagataaggacgacttggatttggcggtgaagaatgccagagaagcctttgaccacgggccttggccacgaatgtcaggctatgaaagggcgaggatcatgacaaagtttgcagacttggtcgaagcattcatcgaggaactcgcagcactggatactgccgatgcgggcaaaacgctatctatgggtaaggctgtagatattccagcagcagtacaaatcatgcgctactacgctggagcagcagacaagttacatgggcaaccactaaaaatgaaccaagatacgcagggatatacattaaaggaccccattggcgtcgtgggccacatcattccgtggaactacccaaccatgatgttcttccttaaaaacgccccagcgctcgctgcaggctgcacaatggtcgtcaaaccagctgagcagactccactctccgcactgttctacgctcacctcgccagaatggctggagtccccgacggggtggtcaacgtcgtacccggatttggaccgacagccggagctgcagtctccagccacatggatgtagactcggttagtttcactgggtcacaagaagtgggaagggcgataatgcgtgccgcagctcaaagtaatctcaaaaacgttagcctcgagttaggcgggaaatcgccagttattatttttgacgacgcggatgtcgatatggccgttagcctgtcccagcttgcctgctttaccaataagggagagatttgcgtagcgacctcaagagtgtatgttcaagaaggtatatacgatgcacttgtgaagaagatagtagaggcggctagagaatggaggttcgacactaaagccaacatgggtccgcaggtcgacaagaaacaattcgagagggttctcaaatacattgatttagggaagagggaaggagcgaccttattaactggaggaaaaaccaatggagacaagggctattacatccaaccaaccatcttcctagatgtcagggaggatatgaatatagcccaggatgagctcttcggtccggtaatggccctcatgaaattcaagacggttgatgaggcgatccagaaggccaactgcaccaagtatggactcgccgccgggatcgtgaccaaggagctgaacttagcgaacaccgtatcccggtcgatccgcgccggcgctgtgtgggtgaactgctacttcggctttgatccggacgcaccgttcggtggctacaagatgtccgggttcggtaaggacaggggggtactcgccatcgaccagtacctgaaggccaagacggtcaacaccgcaatccctaacagcccctggtattaagcagcaccttcactagtaatgagttaaaatatc

SEQ ID NO: 382 - protein, 504 aa, Bixa orellana
MESTGRAPLGNGRIGNPGGLVVPEIKFTKLFINGRFVDNVSGQTFDTRDPRTGDVLATIAEADKDDLDLAVKNAREAFDHGPWPRMSGYERARIMTKFADLVEAFIEELAALDTADAGKTLSMGKAVDIPAAVQIMRYYAGAADKLHGQPLKMNQDTQGYTLKDPIGVVGHIIPWNYPTMMFFLKNAPALAAGCTMVVKPAEQTPLSALFYAHLARMAGVPDGVVNVVPGFGPTAGAAVSSHMDVDSVSFTGSQEVGRAIMRAAAQSNLKNVSLELGGKSPVIIFDDADVDMAVSLSQLACFTNKGEICVATSRVYVQEGIYDALVKKIVEAAREWRFDTKANMGPQVDKKQFERVLKYIDLGKREGATLLTGGKTNGDKGYYIQPTIFLDVREDMNIAQDELFGPVMALMKFKTVDEAIQKANCTKYGLAAGIVTKELNLANTVSRSIRAGAVWVNCYFGFDPDAPFGGYKMSGFGKDRGVLAIDQYLKAKTVNTAIPNSPWY

SEQ ID NO: 383 - DNA, 2216 bp, Burkholderia cepacia
  CDS (646)..(2103): transl_table=11
atcttctatcacaccggggagttggtccagtcgttcaccgaggtttacacctgactgccacgcaggagatagcacatgactcaggctgactcacttcatagcgtcgaggccgcggctgatcaactggcctgcggctaaccgcgtcgtcgaggcagctgcgatgcacgcgcagcgcctcggcgtatgcgtgaacatcgcggtggtcgacgtggcggggaatcttgccgcgtttctgcgcatgcctggagcgaccgttgcactccatcgagatcgccatcgacaaggcatacacggcagccagtttcggcttaccgaccagtcggtggagtgagcccttgctgagtcattccgaagcggtccgccaaggcatcgtgcgaaggccccgcttcaatccttcggcggtggtttgccgattgttgaaagtgccatcgcatcgggggtattggcgtgtctggcggtaccgaagagcaggacgagcactgtgcgcaagccggattgagcctgctaggtctaactcaaacctgaaaaatctttccggaaagtcgactgccgccgcgaccacatttgcctaataggaagcttactacatcatgctgattaccgatccccaagcgaccgcgagcactggaaaccagtccgacgctcatgctaaagaaatccacaacttcatcaacggcgaatatgtgccgggtcagcgttggttcgagaagcagctcgccgttgaataacgcggtcattgccaaggtgcacgaagccggccgtgccgaagtcgacgcggcggtggctgcggcgcaggccgcgcttaagggagcgtgggggcgcatgagcttggcccagcgcgtggaagtgctgtacgcggtggccgacggcatcaaccgtcgttttgacgacttccttgccgctgaggtagaggacacgggcaagcctatgagcctagcgcggcatgtggacattccgcgtggggcggccaatttcaagatctttgccgacgtggtgaagaacgtacccactgagttttttgaaatgcctacaccggatggtgtcggggcgatcaactacgccgtgcgtcgaccggtgggggtggtcggggtgatctgtccatggaacctgccgctgctgctgatgacctggaaagtcggcccagcgctggcctgtggcaacaccgttgtggtcaagccctccgaagagacgccgcagaccgctgcattgctgggcgaagtgatgaacacggcgggcgtgccgccaggggtctacaacgtcgtgcacggcttcggccccaactccacgggcgaattcctcacctcccacccggatgtcaacgccatcaccttcaccggtgaaaccggcacgggtgaggccatcatgaaggccgcggctgacggtgctcgccccgtgagtctggagttgggcggcaagaacgctgccatcgtgtttgccgactgcgacctcgacaaggccattgaaggcacgctgcgctcgtgcttcgccaactgtggccaggtctgcctgggtaccgagcgggtatatgtcgagcgccccatctttgatcgttttgtctcccgcctcaaaaaaggcgctgaaggcatgcagctcggccgcccggaagatttggccaccggtatgggcccgctgatttcgcaagagcatcgtgagaaggtgctgtcgtattacaagaaggcagttgaagcgggcgcgacggtggtgacgggcggcggtgtacccgaaatgccggaggcgctcaaaggcggcgcgtgggtgcagcccaccatctggacgggcttgggcgacgactcggtggttgcccgcgaggagatcttcggcccttgcgcgctggtcatgccattcgacagcgaagaagaggtgatccgccgtgccaacgataacgactacggcctggcacggcggatctggaccaccaatctgtcgcgtgcccaccgcgtggcgggggccatcgaggtcggcattgcgtgggtgaactcttggttcctgcgcgatttgcgcaccgcgttcggcgggagcaagcagtcgggtatcgggcgcgagggcggagtccactccctggagttctacacggaactcaaaaacgtttgcatcaaactgtgatcatggacaaaactcaaatcaacccacttggcgacgccctgtatcaggcactgaccacgcgaaccgtggttgatccgctgaccgagcgccaccccgatatgatgatcgaggac

SEQ ID NO: 384 - protein, 485 aa, Burkholderia cepacia
MLKKSTTSSTANMCRVSVGSRSSSPLNNAVIAKVHEAGRAEVDAAVAAAQAALKGAWGRMSLAQRVEVLYAVADGINRRFDDFLAAEVEDTGKPMSLARHVDIPRGAANFKIFADVVKNVPTEFFEMPTPDGVGAINYAVRRPVGVVGVICPWNLPLLLMTWKVGPALACGNTVVVKPSEETPQTAALLGEVMNTAGVPPGVYNVVHGFGPNSTGEFLTSHPDVNAITFTGETGTGEAIMKAAADGARPVSLELGGKNAAIVFADCDLDKAIEGTLRSCFANCGQVCLGTERVYVERPIFDRFVSRLKKGAEGMQLGRPEDLATGMGPLISQEHREKVLSYYKKAVEAGATVVTGGGVPEMPEALKGGAWVQPTIWTGLGDDSVVAREEIFGPCALVMPFDSEEEVIRRANDNDYGLARRIWTTNLSRAHRVAGAIEVGIAWVNSWFLRDLRTAFGGSKQSGIGREGGVHSLEFYTELKNVCIKL

SEQ ID NO: 385 - DNA, 1815 bp, Atriplex prostrata
  CDS (79)..(1581)
ttggccactctttctctctcctccccttttaattttattaattattaatcgactttatttcttttaatttcatctaaaatggcgtttcctatgcctgttcgtcaactcttcatcgatggggagaggagagaaccccttttaaaaaatcgcattcccatcatcaacccttctactgaagaaatcatcggtgatattcctgctgcaactgcagaggatgtagaggttgcagtagtagcagctagaaaagcatttaagaggaacaaaggtagagattgggctgcaacttctggtgctcatcgtgctaaacatttgcgtgctattgctgctaagataacagaaagaaaagatcatttcgttaaactggaaacccttgattctggaaaaccattcgatgaagccgtgttggacattgatgatgttgcttcatgctttgaatactttgctggtcaagcagaagctctggatgctaaacaaaaggctccagtcaccctgcctatggacagatttaaaagtcatgttctcaggcagcccattggtgttgttggattaatatccccatggaattatccacttctaatggctacatggaaaattgcccccgcacttgctgctggatgcacagctgtacttaaaccatcagaattggcatctgtgacttgtctagaatttggtgaagtgtgtaacgaagtgggacttcctccaggtgtgttgaatattttgacaggattaggtcctgatgctggtgccccaatagtatctcatcctgatattgacaagattgcctttactgggagtagtgccactggaagcaagattatggcttctgctgcccaactagttaagcctgttacgttagagcttggaggtaaaagtcctgttatcatgttcgaagatattgatattgaaacagctgttgaatggactctttttggcgttttctggacaaatggtcaaatctgtagtgcaacatctagactgcttttgcatgaaagtattgcagctgaatttgttgataggatggtaaagtggacaaaaaacataaaaatttctgacccgtttgaagaaggatgccgacttggtcctgttatcagtaaaggacagtatgacaagattatgaagttcatatcaacagcaaagagtgaaggggctacaattttgtgtggaggctcccgccctgagcatttgaagaaagggtattatattgaacccaccattataactgatattaccacatccatgcaaatatggaaagaggaagtgtttggccctgtcatatgtgttaaaacatttaaaactgaagatgaagccattgaattggcaaatgatacagagtatggtttagctggtgccgtgttttctaaagatcttgaaagatgtgagagggtaactaaggctctagaagttggagctgtttgggttaattgctcacaaccatgctttgttcatgctccatggggaggagtgaagcgtagtggatttggacgtgaacttggggaatggggtatcgagaattacttgaatatcaagcaggtgactagcgatatttctgatgaaccatggggctggtacaagtctccttagagctgtgaggaatttgaacaccagcattattgtaaagtgaaatatggtgagactggaccttgaaatgattcacaaaggtctagtttaaagtatgaatggattgaataaaggttgtttgatgctggaattcgcttagcaaagcttaattttgttgtgtgtattattacttcagacaattgaatcggattagaaataagatgctacgtagtttgtctttgctaaaaaaaaaaaaaa

SEQ ID NO: 386 - protein, 500 aa, Atriplex prostrata
MAFPMPVRQLFIDGERREPLLKNRIPIINPSTEEIIGDIPAATAEDVEVAVVAARKAFKRNKGRDWAATSGAHRAKHLRAIAAKITERKDHFVKLETLDSGKPFDEAVLDIDDVASCFEYFAGQAEALDAKQKAPVTLPMDRFKSHVLRQPIGVVGLISPWNYPLLMATWKIAPALAAGCTAVLKPSELASVTCLEFGEVCNEVGLPPGVLNILTGLGPDAGAPIVSHPDIDKIAFTGSSATGSKIMASAAQLVKPVTLELGGKSPVIMFEDIDIETAVEWTLFGVFWTNGQICSATSRLLLHESIAAEFVDRMVKWTKNIKISDPFEEGCRLGPVISKGQYDKIMKFISTAKSEGATILCGGSRPEHLKKGYYIEPTIITDITTSMQIWKEEVFGPVICVKTFKTEDEAIELANDTEYGLAGAVFSKDLERCERVTKALEVGAVWVNCSQPCFVHAPWGGVKRSGFGRELGEWGIENYLNIKQVTSDISDEPWGWYKSP

SEQ ID NO: 387 - DNA, 1830 bp, Lotus corniculatus
  CDS (7)..(1635)
  misc_feature (1398)..(1398): s is g or c
  misc_feature (1566)..(1566): y is t or c
gtgatcatggctgctcgcactctttcttatctgctttctcgctctcgctctctttcttcttcttctggagctgcttctctgcttccctcacttggaggaaaatctggagggtggagaaacagtaacaacagatatagtactgcagcagtagtagaggaattgatcactccacaagtttcaatcaattacacacagcatctcataaatgggaaattcgtggatgctgcatcagggaaaacttttccagcctatgacccgcgcacaggggatgtgattgctcatgttgctgaaggcgatgctgaagatgtcaaccgtgcggtggcagcagctcgcaaggcctttgatgaaggcccttggccaagaatgactgcttatgaaagaagtcggatattgctgcgcttcgctgatttggttgagaagcacaacgatgagattgcagctctggagacatggaacaatggaaagccttatgaacaggcagccaaggctgaagtgccaacgttcgtgcgtttatttcgctattatgctggctgggcagataaaattcatgggttgactgtccctgctgatggaaattatcatgtccagacattgcatgaaccaattggtgtagcaggacaaattataccttggaactttcctctacttatgtttgcttggaaagttggaccagctctagcatgtggtaacaccattgtccttaagactgctgagcaaacaccgctaacggctcttgttgtggcaaaattacttcatgaggctggtcttcccccaggtgttctgaacatagtttccgggtatggtccaactgctggtgcacctcttgcaagtcacatggatgtggacaagctagcattcactggatcaactgatactggaaaagttgtacttggattggctgcaaaaagtaatcttaagccagtgacattggagcttggagggaaatcacctttcatagtatgtgaggatgctgatgttgacaaggctgttgagcttgcacacttcgctctgttctttaatcaggggcaatgttgctgtgctgggtctcgaacctttgtacatgagcgtgtctatgatgagttcttggagaaatcaaagaaacgggctttgaggcgtgttgttggtgatccgttcaaaaagggtgttgaacaaggtcctcagattgatacagaacaattcgagaaaattcttaggtacatcaaatctggaattgaaagcaatgccacccttgagtgtggcggtgatcgattggggtcaaaaggcttctatgtccagccaaccgtcttctcaaatgttcaggatgatatgctgatagcacaagatgaaatctttggtcctgttcagaccatcttcaaattcaaggaaattgatgaagtaattcgacgggcaaattcaacscgatatggtctagcggctggtgtgttcacccagaacttggccactgccaacactttgatgagggcactgagagctggaactgtgtggatcaattgctttgatgtgtttgatgctgcaattccttttggtggttacaagatgagtgggattggaagggagaaagggatytacagtcttcacaactaccttcaggtgaaagctgttgtcacaccattgaagaatcctgcgtggctgtaaataaactcagctttgtatcttgtccgttgaacaataaaaagtgacagtaccaaagtaccccatttgtaattgtgaaaggttttggatactctcacatcacatactaaattgtcatgttataacataaaggactaaaaaacagctatataatatgacaaactattatggagttcaaaaaaaaaaaaaaaaaaaaaa

SEQ ID NO: 388 - protein, 542 aa, Lotus corniculatus
MAARTLSYLLSRSRSLSSSSGAASLLPSLGGKSGGWRNSNNRYSTAAVVEELITPQVSINYTQHLINGKFVDAASGKTFPAYDPRTGDVIAHVAEGDAEDVNRAVAAARKAFDEGPWPRMTAYERSRILLRFADLVEKHNDEIAALETWNNGKPYEQAAKAEVPTFVRLFRYYAGWADKIHGLTVPADGNYHVQTLHEPIGVAGQIIPWNFPLLMFAWKVGPALACGNTIVLKTAEQTPLTALVVAKLLHEAGLPPGVLNIVSGYGPTAGAPLASHMDVDKLAFTGSTDTGKVVLGLAAKSNLKPVTLELGGKSPFIVCEDADVDKAVELAHFALFFNQGQCCCAGSRTFVHERVYDEFLEKSKKRALRRVVGDPFKKGVEQGPQIDTEQFEKILRYIKSGIESNATLECGGDRLGSKGFYVQPTVFSNVQDDMLIAQDEIFGPVQTIFKFKEIDEVIRRANSTRYGLAAGVFTQNLATANTLMRALRAGTVWINCFDVFDAAIPFGGYKMSGIGREKGIYSLHNYLQVKAVVTPLKNPAWL

SEQ ID NO: 389 - DNA, 1556 bp, Spinacia oleracea
  CDS (22)..(1515)
tttcttcgcatttaaccaagaatggcgttcccaattcctgctcgtcagctattcatcgacggagagtggagagaacccattaaaaaaaatcgcatacccgtcatcaatccgtccactgaagaagtcatcggtgatattccggcagccacggctgaagatgtggaggttgcggtggtggcagctcgaagagcctttaggaggaacaattggtcagcaacatctggggctcatcgtgccacatacttgcgtgctattgctgctaagataacagaaaaaaaagatcatttcgttaaactggaaaccattgattctgggaaaccttttgatgaagcagtgctggacattgatgacgttgcttcacgttttgaatattttgccggacaagcagaagctcttgatggtaaacaaaaggctccagtcaccctgcctatggaaaggttcaaaagtcatgttctcaggcagccccttggtgttgttggattaatatccccatggaattacccacttctaatggctacatggaaaattgctccagcacttgctgctgggtgtacagctgtacttaagccatccgagttggcatctgtgacttgtctagaattcggtgaagtttgcaacgaagtgggacttcctccaggcgtgttgaatatcttgacaggattaggtccagatgctggtgcaccattagtatcacaccccgatgttgacaagattgcctttactgggagtagtgccactggaagcaaggttatggcttctgctgcccaattggttaagcctgttacattagaacttgggggtaaaagtcctattgtagtgtttgaagatgttgatattgataaagttgtggaatggactatttttggctgtttctggacaaatggtcaaatatgtagtgcaacgtctagactgcttgtgcatgaaagtattgcagctgagtttgttgataagcttgtaaaatggacgaaaaacattaaaatttctgacccatttgaagaaggatgccggcttggccctgttattagtaaaggacagtacgacaaaattatgaagttcatatcaacagcaaagagtgagggggcaactattttgtatggaggttcccgtcctgagcatttgaagaaaggttattacattgaacccaccattgtaactgatatctccacatccatgcaaatatggaaagaggaagtttttggccctgtcttgtgtgttaaaacatttagttccgaagatgaagccattgcattggcaaatgatacagagtacggtttagctgctgctgtgttttctaatgatcttgaaagatgtgagaggataacgaaggctctagaagttggagctgtttgggttaattgctcacaaccatgctttgttcaagctccttggggaggcatcaagcgtagtggttttggacgtgaacttggagaatggggtatccagaattacttgaatatcaagcaggtgactcaagatatttctgatgaaccatggggatggtacaagtctccttgaagctatgatcaaatttgaatgacggtgttgtttttgttaag

SEQ ID NO: 390 - protein, 497 aa, Spinacia oleracea
MAFPIPARQLFIDGEWREPIKKNRIPVINPSTEEVIGDIPAATAEDVEVAVVAARRAFRRNNWSATSGAHRATYLRAIAAKITEKKDHFVKLETIDSGKPFDEAVLDIDDVASRFEYFAGQAEALDGKQKAPVTLPMERFKSHVLRQPLGVVGLISPWNYPLLMATWKIAPALAAGCTAVLKPSELASVTCLEFGEVCNEVGLPPGVLNILTGLGPDAGAPLVSHPDVDKIAFTGSSATGSKVMASAAQLVKPVTLELGGKSPIVVFEDVDIDKVVEWTIFGCFWTNGQICSATSRLLVHESIAAEFVDKLVKWTKNIKISDPFEEGCRLGPVISKGQYDKIMKFISTAKSEGATILYGGSRPEHLKKGYYIEPTIVTDISTSMQIWKEEVFGPVLCVKTFSSEDEAIALANDTEYGLAAAVFSNDLERCERITKALEVGAVWVNCSQPCFVQAPWGGIKRSGFGRELGEWGIQNYLNIKQVTQDISDEPWGWYKSP

SEQ ID NO: 391 - DNA, 1531 bp, Atriplex centralasiatica
  CDS (20)..(1522)
ggctaagctttcatctaaaatggcgtttcctatgcctgttcgtcaactcttcatcgatggagagtggagagaaccccttttaaaaaatcgcatacccatcatcaacccttctactgaagaaatcatcggtgatattcctgcagcaactgcagaggatgtggaagttgcagtagtagcagctagaaaagcctttaagaggaacaaaggcagagattgggctgcaacttctggtgctcatcgtgctagatacttgcgtgctattgctgctaagataacagaaagaaaagatcatttcgttaaactggaaacccttgattctggaaaaccactggacgaagcagtgttggacattgatgatgttgctacatgctttgaatactttgccggtcaagcagaagctctggatgctaaacaaaaggctccagtcaccctgcctatggacagatttaaaagtcatgttctcaggcagcctattggtgttgttggattaatatccccatggaattacccacttctaatggctacatggaaaattgctcccgcacttgctgctgggtgcacagctgtacttaaaccatcagaattggcatctgtgacttgtctagaatttggtgaagtttgtaacgaagtgggacttcctccaggtgtgttgaatattttgacaggattaggtcctgatgctggtgccccaatagtatctcatcctgatgttgataagattgcatttactgggagtagtgccactggaagcaagattatggcttctgctgcccaactagttaagcctgttacattagagcttggaggtaaaagtcctgttatcatgttcgaagatattgatattgaaacagctgttgaatggactctttttggcgttttctggacaaatggtcaaatctgtagtgcaacatctagactgcttgtgcatgaaagtattgcagctgaatttgttgataggatggtaaagtggacaaaaaatataaaaatttctgacccgtttgaagaaggatgccgacttggtcctgttatcagtaaaggacagtatgacaagattatgaatttcatatcaacagcaaagagtgaaggggcaacaattttgtgtggaggctcccgccctgagcatttgaagaaagggtattacattgaacccaccattataactgatattactacatccatgcaaatatggaaagaggaagtgtttggcccagtcatatgtgttaaaacatttagtactgaagatgaagccattgaattggcaaatgatacagagtatggtttagctggtgccgtgttttctaaagatcttgaaagatgtgagagggtaactaaggctctagaagttggagctgtctgggttaactgctcacaaccatgctttgttcatgctccatggggaggagtcaagcgtagtggatttggacgtgaacttggggaatggggtatcgagaattacttgaatatcaagcaggtgactagcgatatttctgatgaaccatggggctggtacaagtctccttgaagggatccg

SEQ ID NO: 392 - protein, 500 aa, Atriplex centralasiatica
MAFPMPVRQLFIDGEWREPLLKNRIPIINPSTEEIIGDIPAATAEDVEVAVVAARKAFKRNKGRDWAATSGAHRARYLRAIAAKITERKDHFVKLETLDSGKPLDEAVLDIDDVATCFEYFAGQAEALDAKQKAPVTLPMDRFKSHVLRQPIGVVGLISPWNYPLLMATWKIAPALAAGCTAVLKPSELASVTCLEFGEVCNEVGLPPGVLNILTGLGPDAGAPIVSHPDVDKIAFTGSSATGSKIMASAAQLVKPVTLELGGKSPVIMFEDIDIETAVEWTLFGVFWTNGQICSATSRLLVHESIAAEFVDRMVKWTKNIKISDPFEEGCRLGPVISKGQYDKIMNFISTAKSEGATILCGGSRPEHLKKGYYIEPTIITDITTSMQIWKEEVFGPVICVKTFSTEDEAIELANDTEYGLAGAVFSKDLERCERVTKALEVGAVWVNCSQPCFVHAPWGGVKRSGFGRELGEWGIENYLNIKQVTSDISDEPWGWYKSP

SEQ ID NO: 393 - DNA, 1726 bp, Triticum aestivum
  CDS (56)..(1567)
cagcgccctgacccggtcaacttccacggcgcaagctcactccccgggcgcggcgatggtcgcgccggctgctatcccacaacgccaactcttcatcgatggcgactggcgcgcgcccgctctcggccgccgcctccccgtcatcaacccgacgaccgaggtcaccatcggcgaaatccccgcagggacctcggaggacgtggacgcggcggttgccgcagcgcgggccgctcttaagcggaatcggggtcgcgactggtcgcgcgcccctggcgccgtccgggccaagtacctccgcgcgatcgccgccaagatgattgagcggaaatctgatctggctaggctcgaggcacttgattgcgggaagcctcttgatgaagcggcatgggacatggacgatgtcgccggctgctttgagttcttcgcaggtcatgctgaagccttggacaaaaggcaaaatgctgcagttgctctcccggagaattttaaatgccatcttaagaaggaacctattggtgtagttgctctaatcacaccttggaactatcctctcctgatggctgtatggaaggtagcccctgctctggcagctggctgtacagctgtactgaaaccatctgaattagcttccgtgacttgcttagagcttggtgatgtgtgtaaagagattggtcttccatcaggtgtcttaaacattgtgactggattaggtcatgaagctggcgctcctttgtcgtcacaccctgatgtcgacaaggttgcatttaccgggagctatgcaaccggtcaaaagattatggttgctgcagctcctacagtcaagcctgttacattggaacttggtggcaaaagtccaattgtagtatttgatgatgtcgacattgacaaagctgttgagtggactctatttgggtgcttttggaccaacggtcagatttgcagtgcgacatctcgtcttcttatccataaaaacatcgctaaagaattcgtcgacaggatggttgcatggtccaaaaatatcaaggtgtcagacccgctcgaggaaggttgcaggcttgggccagttgttagtgaaggacagtatgagaagatcaagaagtttgtagcgaatgctaaaagtgaaggtgccaccattctgactgggggtgtcaggcccaagcatctggagaaaggtttcttcattgaacccacaatcatcactgacatcaacacatcaatggagatttggagggaagaggtattcggcccagtcctctgtgtgaaggaattttctaccgaagaggaagccatcgaactggccaatgatactcattatggtctggctggtgccgtgatttctggtgaccgtgagcgatgccagagattagccgaggagattgacgcgggatgcatttgggtgaactgctcgcagccttgcttctgccaagctccgtggggcgggaacaagcgcagcggctttgggcgcgagctcggagaagggggcattgataactacctgagcatcaagcaagtcacggagtacacatctgatgcgccgtggggatggtacaaagctccggctaactaagatgtaattgagctggttcgaggacctggatctgttccatcaggataaatctgtgcgccggcctttgtagtggtgaataaatgtagtttgtcatgtactgctgaacctttcttgcgaaataaatggcatgagttttgtggccaaaaaaaaaaaaaaaaa

SEQ ID NO: 394 - protein, 503 aa, Triticum aestivum
MVAPAAIPQRQLFIDGDWRAPALGRRLPVINPTTEVTIGEIPAGTSEDVDAAVAAARAALKRNRGRDWSRAPGAVRAKYLRAIAAKMIERKSDLARLEALDCGKPLDEAAWDMDDVAGCFEFFAGHAEALDKRQNAAVALPENFKCHLKKEPIGVVALITPWNYPLLMAVWKVAPALAAGCTAVLKPSELASVTCLELGDVCKEIGLPSGVLNIVTGLGHEAGAPLSSHPDVDKVAFTGSYATGQKIMVAAAPTVKPVTLELGGKSPIVVFDDVDIDKAVEWTLFGCFWTNGQICSATSRLLIHKNIAKEFVDRMVAWSKNIKVSDPLEEGCRLGPVVSEGQYEKIKKFVANAKSEGATILTGGVRPKHLEKGFFIEPTIITDINTSMEIWREEVFGPVLCVKEFSTEEEAIELANDTHYGLAGAVISGDRERCQRLAEEIDAGCIWVNCSQPCFCQAPWGGNKRSGFGRELGEGGIDNYLSIKQVTEYTSDAPWGWYKAPAN

SEQ ID NO: 395 - DNA, 2159 bp, Sorghum bicolor
  CDS (223)..(1866)
agagagagagaggcacccggcagccattactcgtcctcactcccacaccaacaacctccatccagtgcctgccgcagccgcttctgctgcagcggggacgcgtgcaagtacaggaggatatccgcttccattactgcgctgcgccgcggcggaaacagcagcagcagaggggttcttcgattcggggggttcggccggcgggcgcaataaattttgcccgggatggctcggagggccgcgtcctcgctcgtctcccgctgcctcttggccagggcctctgcccccgccgcgccacccgctgtcccctctgcgctgcgcaggccagatgggatgcgcggactgttgccaggcgtccttcagaggttcagcactgcagcagcagtagaggagcccatcacgccctcagtccaagtgaactatacaaagctcctcattaatggcaactttgttgatgctgcatccggcaagaccttcccaactctggaccctcgtacaggggaggtgattgctcatgtggctgagggtgatgcagaggacattaaccgtgcagtagctgctgcccgcaaggcttttgatgaagggccatggccgaagatgactgcctatgagaggtcccgtatcctactgcggtttgctgatttgattgagaagcacaatgatgagcttgctgctttggagacgtgggacaacggaaagccatatgagcaagcagcccatattgaagtaccaatggtggcccgtcttatgcgttactatgctggttgggctgataagatccatgggctcgttgtgccagctgatggcccacaccatgtacagatcttgcatgagccaatcggtgttgcaggtcagatcatcccatggaacttccctcttctgatgtttgcctggaaagttggccctgctttggcatgtggaaacactctcgtgctcaagactgctgagcaaactcctctatcggctttgtatatctccaagctgttgcatgaggctggactacctgagggtgttgtgaatgtcgtttctggttttggccctactgctggtgctgctcttgctagtcacatggatgttgataagcttgcatttacgggatctaccgataccggcaaagttgttcttgagttggctgcaaggagcaaccttaagacagtgacactggagttaggaggcaagtctccttttatcatcatggatgatgctgacattgaccatgctgttgagcttgcgcactttgccctgttctttaaccaggggcaatgctgttgtgctggatctcgcacatttgtacatgagcgtgtttatgatgagtttgtggagaaagccaaggctcgtgcattgaagcgcgtcgttggtgatccattcaggaaaggtgttgaacagggcccgcagattgacgacgagcaattcaacaagatcttgcgctacattaggtctggtgttgacagtggagctaaccttgtgacgggtggtgataggttgggtgagaaaggttactacatccagccaacgattttctcagatgtccaggatggcatgaagattgctcaggaggagatatttgggcctgttcagtcaatcctcaagttcaaggatctcaatgaggttattaagagggcaaatgcgagcccatatggattggccgctggtgtgttcaccaatagcttggacacagccaacaccctgacgcgtgcgctcagggctgggaccgtctggattaactgcttcgacatcttcgatgctgcaattccctttggtgggtacaagatgagcggcattgggagggagaagggcattgacagcctgaagaactacctgcaagtgaaggcagtcgtcacccctatcaagaacgccgcgtggttgtagatgctgcaagtatggccttctggataagaactacggatattcatttcctcatcacatcccgcacaataatatgaaggcgataatcagttagatgacgatgaagaacgaacagctataataagatttgccctttggttgtcagttatatctctaataagccttttggttggtgccatattgtgcaatttggctgcaccctttttcttttggataagactatattgtagcaacggattttgcagagttcattatgaaaaaacatttgttagaagagcaaaaaaaaaaaaaaaaaa

SEQ ID NO: 396 - protein, 547 aa, Sorghum bicolor
MARRAASSLVSRCLLARASAPAAPPAVPSALRRPDGMRGLLPGVLQRFSTAAAVEEPITPSVQVNYTKLLINGNFVDAASGKTFPTLDPRTGEVIAHVAEGDAEDINRAVAAARKAFDEGPWPKMTAYERSRILLRFADLIEKHNDELAALETWDNGKPYEQAAHIEVPMVARLMRYYAGWADKIHGLVVPADGPHHVQILHEPIGVAGQIIPWNFPLLMFAWKVGPALACGNTLVLKTAEQTPLSALYISKLLHEAGLPEGVVNVVSGFGPTAGAALASHMDVDKLAFTGSTDTGKVVLELAARSNLKTVTLELGGKSPFIIMDDADIDHAVELAHFALFFNQGQCCCAGSRTFVHERVYDEFVEKAKARALKRVVGDPFRKGVEQGPQIDDEQFNKILRYIRSGVDSGANLVTGGDRLGEKGYYIQPTIFSDVQDGMKIAQEEIFGPVQSILKFKDLNEVIKRANASPYGLAAGVFTNSLDTANTLTRALRAGTVWINCFDIFDAAIPFGGYKMSGIGREKGIDSLKNYLQVKAVVTPIKNAAWL

SEQ ID NO: 397 - DNA, 1862 bp, Sorghum bicolor
  CDS (116)..(1771)
gagcaaggggaggccagtgctctcctgtattggcctcagagacttgcctggcatacatatcccacagaggccggagctgatcctgatcgcgcacgctcagcacctgcttgagggcatggctgcaaggagggctgcttcctccgtcctctctcgcttcctcctcacaaggccttcgccttcgccttcgcctgcttctgctgcttctcccgccggcaaatccgccctcctaggagcagggggccctcttcacaggttcagcactgcaccggcagccgctgctgccaccgcagaggagccaatccagcccgccgtggaggtgaagcacacccagctcctcatcaatggcaacttcgttgacgccgcttctgggaagacgttcccgacgctggacccccgcaccggcgaggtcatcgcgcgcgtcgccgagggcgacagcgaggacatcgaccgcgccgtcgccgccgcccgcagggccttcgacgagggcccgtggccgaggatgaccgcctacgagcggtgccgggtgctgctgcgcttcgcggacctgatcgagcggcacgcggaggagatcgcggcgctggagacgtgggacaacgggaagacgctggcgcaggcggcgggcgccgaggtgcccatggtggcgcggtgcatccggtactacgccgggtgggcggacaagatccacggcctggtggtgccgggcgacggcgcgcaccacgtgcaggtgctgcacgagcccgtcggcgtggccgggcagatcatcccctggaacttcccgctgctcatgttcgcctggaaggtcggcccggcgctggcctgcggcaacaccgtcgtcctcaagaccgccgagcagacgccgctctccgcgctctacgtcgccaacctcctccacgaggctgggctccccgagggcgttctgaacgtcgtgtccggcttcggtccgacggccggcgccgcgctctgtagccacatgggtgttgacaagcttgcgttcacgggatcgacgggcacggggcagatcgtgctcgaactggcggcgaggagcaacctgaagccggtgacgctggagctcggtggcaagtcccctttcgtcgtcatggacgacgccgacgtcgaccaggccgtcgagctcgcgcaccaagcggtcttcttcaaccagggccaatgctgctgcgccgggtcgcggacgttcgtgcacgagcgcgtgtacgacgagttcgtggagaagtccaaggcccgcgccctgaagcgcgtggtcggcgaccccttcaggaacggggtcgaacaggggcctcagatcgacggcgatcagttcaacaagatcttgcggtacgtccagtccggtgtcgacagcggcgccaccctcgtcaccggcggcgacagggtaggcagcaggggcttctacatacagccgacggtgtttgccgacgccaaggacgacatgaagatcgctcgggaggagatattcgggccggtgcagaccatcctcaagttcagcggcatggaggaggtgatccggcgcgcgaacgcgacgcactacgggctggcggcgggggtgttcacgcggagcctggacgcggccaacacgctgtcccgggcgctgcgggcgggcacggtgtgggtgaactgctacgacgtgttcgacgccaccatcccgttcggcggctacaagatgagcggcgtcgggcgagagaagggcgtctacgccctccgcaactacctccagaccaaggccgtcgtcacgcccatcaaggaccccgcctggctgtaatcacacccgtccctcaccggcgctgcgccgattctcgcagagaatgtgaccaataaaacaaccgtttataaacaaaaaaaaaaaaaaaaaa

SEQ ID NO: 398 - protein, 551 aa, Sorghum bicolor
MAARRAASSVLSRFLLTRPSPSPSPASAASPAGKSALLGAGGPLHRFSTAPAAAAATAEEPIQPAVEVKHTQLLINGNFVDAASGKTFPTLDPRTGEVIARVAEGDSEDIDRAVAAARRAFDEGPWPRMTAYERCRVLLRFADLIERHAEEIAALETWDNGKTLAQAAGAEVPMVARCIRYYAGWADKIHGLVVPGDGAHHVQVLHEPVGVAGQIIPWNFPLLMFAWKVGPALACGNTVVLKTAEQTPLSALYVANLLHEAGLPEGVLNVVSGFGPTAGAALCSHMGVDKLAFTGSTGTGQIVLELAARSNLKPVTLELGGKSPFVVMDDADVDQAVELAHQAVFFNQGQCCCAGSRTFVHERVYDEFVEKSKARALKRVVGDPFRNGVEQGPQIDGDQFNKILRYVQSGVDSGATLVTGGDRVGSRGFYIQPTVFADAKDDMKIAREEIFGPVQTILKFSGMEEVIRRANATHYGLAAGVFTRSLDAANTLSRALRAGTVWVNCYDVFDATIPFGGYKMSGVGREKGVYALRNYLQTKAVVTPIKDPAWL

SEQ ID NO: 399 - DNA, 2162 bp, Secale cereale
  CDS (175)..(1824)
cgccaccatcactgctcctccctcctcagtccccagtactcttccccgcacgcagctggggacgccctcccatttactgagcctctgaaccaagaggaggaggaggaggaggagaagaattgattgctgatccggcgcagccaataaattctccctgcctccgccgaggtcatcatggctgctgccgccacgaggagggccgcctcctcgctcgcctcccgctgcctgctctccaggcccgcagcgtcgcccgccgctgtcccctctgcgctccgcagggcagatggggcacgtggattgctgccgggactccttcagaggttcggcactgcggcagcagcagaggagcccatttcgccttctgtccaagtgagcgagacacagctcctcatcaacggcaaattcgttgatgctgcatctggcaagactttcccgactctggaccctcgcactggggaggtgattgcccgtgtgtctgaaggagatgccgaagacgttgaccgtgcggttatcgcagcccgcaaggcattcgatcatgggccatggccaaagatgactgcctatgagagatcccgcattcttctgcggtttgctgatttgatagagaaacacaatgacgatattgctgcactggagacgtgggacaacgggaagccttatgagcaagctgctcaaatcgaagtgccaatgcttgctcggcttatgcggtactatgcaggctggactgacaagatccatggcctcatcgtaccggctgatggcccgcaccatgtacaggtgctgcacgagccgattggtgtcgtgggtcagatcatcccgtggaacttcccacttttgatgtatggctggaaagttggccctgctttggcctgtgggaacactattgttctcaagacggctgaacaaactcctctatctgccctctatgtttctaagctgttgcatgaggctggactacccgaaggtgtcctgaacatcgtatctggtttcggtcctaccgctggggctgctcttgctagccacatggatgttgacaagattgcattcactggatcaactgatactgggaaagttattcttgagttatctgcacggagcaatcttaagccagtgacactggagctaggaggcaagtctccttttatcgtcatggatgacgcagatattgaccaagccgttgagcttgcgcattttgcgctgtttttcaaccagggacaatgctgctgcgctgggtctcgcacgttcgtacatgagcgtgtttatgatgagtttgttgagaagtccaaagctcgtgctttgaagcgtgtagttggtgatccattcaggaaaggtgttgagcagggtcctcagattgatgatgagcaattcaagaagatcttgcgctacattaagtcgggtgtcgacagtggagccacccttgtgacgggtggtgacaagttaggtgacaaaggttactacatccagccaacaattttctcagatgtgcaggatggcatgaagattgcccaagaggagatatttgggcctgttcagtcaatcttcaagttcaatgacctcaatgaggtgatcaagagagcgaacgcaagccagtacgggttggctgccggcgttttcaccaacaacctggacacggccaacaccttgacgcgtgccctcagggccgggacaatctgggtgaactgcttcgacatcttcgacgcggcgatccccttcggcgggtacaagatgagcggcatcggtagggagaagggcatcgacagcctgaagaactacctgcaagtcaaggcggtcgtcaccgcgctcaagaaccccgcatggttgtgagcattgcacacctatggtcctcttgacactccggagaacgtgaagacttgcgacaattggatgagaagaggaagaagaagaggatgatgatgatgacaccaacgaggatcactaataagccgctgccttcatgggcagccagccaccgtctctaataaatatcacatgtgatttggtttcctttgtcaaccgcggcaagacatatatgttgtagcaacattatgtttattaacattatgtttattatcgcttgttggaagaattctctggttgcagtaaatctgattggaagaaaaaaaaaaaaaaaaaaaaaaaaaaaaaaaaaaaaaaaaaaaaaa

SEQ ID NO: 400 - protein, 549 aa, Secale cereale
MAAAATRRAASSLASRCLLSRPAASPAAVPSALRRADGARGLLPGLLQRFGTAAAAEEPISPSVQVSETQLLINGKFVDAASGKTFPTLDPRTGEVIARVSEGDAEDVDRAVIAARKAFDHGPWPKMTAYERSRILLRFADLIEKHNDDIAALETWDNGKPYEQAAQIEVPMLARLMRYYAGWTDKIHGLIVPADGPHHVQVLHEPIGVVGQIIPWNFPLLMYGWKVGPALACGNTIVLKTAEQTPLSALYVSKLLHEAGLPEGVLNIVSGFGPTAGAALASHMDVDKIAFTGSTDTGKVILELSARSNLKPVTLELGGKSPFIVMDDADIDQAVELAHFALFFNQGQCCCAGSRTFVHERVYDEFVEKSKARALKRVVGDPFRKGVEQGPQIDDEQFKKILRYIKSGVDSGATLVTGGDKLGDKGYYIQPTIFSDVQDGMKIAQEEIFGPVQSIFKFNDLNEVIKRANASQYGLAAGVFTNNLDTANTLTRALRAGTIWVNCFDIFDAAIPFGGYKMSGIGREKGIDSLKNYLQVKAVVTALKNPAWL

SEQ ID NO: 401 - DNA, 1881 bp, Zea mays
  CDS (108)..(1760)
aaggccatcgctctcctagcctcggagacttgcctttgcatacacatccccccggagggcggtggccggagctgacccctgatcggacgcgcttagcgcctgagggcatggctgcaaccgtgaggagggctgcttcctccgtcctctctcgcttcctcctcacaaagccttcgccttcgcctgcttctgccgccggcaataattccgctctcctcggatcaggggctgctgctcttcacaggttcagcaccgcaccggcatccgcggccgcggccgcagaggagccgatccagcccgcggtggaggtgaagcacacccagctcctcatcaatggcaacttcgtcgacgctgcttctgggaagacgttcccgacgctggacccgcgcaccggcgaggtcatcgcgcgcgtcgccgagggcgacagcgaggacatcgaccgcgccgtggccgccgcccgcagggccttcgacgagggcccgtggccgaggatgaccgcctacgatcggtgccgcgtgctgctgcgcttcgcggacctgatcgagcggcacgcggaggaggtcgcggcgctggagacgtgggacaacggcaagacgctggcgcaggcggcgggggccgaggtgcccatggtggcgcggtgcgtccggtactacgccggctgggcggacaagatccacggcctggtggcgccggccgacggcgcgcaccacgtgcaggtgctgcacgagccggtcggcgtggccggccagatcatcccctggaacttcccgctgctcatgttcgcctggaaggtcggcccggcgctcgcctgcggcaacaccgtcgtcctcaagaccgccgagcagacgccgctctccgcgctctacgtggccaacctcctccacgaggctgggctccccgagggtgttctgaacgtggtgtccggcttcggcccgacggccggcgcagcgctctccagccacatgggtgtcgacaagcttgcgttcacgggatcgacgggcacggggcagatcgtgctcgagctggcggcgaggagcaaccttaagccggtgacgctggagctcggtggcaagtcccctttcatcgtcatggacgacgccgacgtcgaccaggccgtcgagctcgcgcaccaggcggtcttcttcaaccagggccaatgctgctgcgccgggtcgcggacgttcgtgcacgagcgcgtgtacgacgagttcgtggagaagtccaaggcccgcgccctgaagcgcgtcgtcggcgaccccttcagggacggggtcgaacaggggcctcagatcgacggcgagcaattcaacaagatcttgcggtacgtccagtccggcgtcgacagcggtgccaccctcgtcgccggcggcgacagggtaggcgacaggggcttctacatacagccgacggtgtttgccgacgccaaggacgaaatgaagatcgctcgggaggagatattcgggccggtgcaaaccattctcaagttcagcggcgtggaggaggtgatccggcgcgcgaacgcgacgccctacgggctggcggcgggggtgttcacgcggagcctggacgcggccaacaccctgtcgcgggcgctgcgggcgggcaccgtgtgggtgaactgctacgacgtgttcgacgccaccatcccgttcggcggctacaagatgagcggcgtcgggcgggagaagggcatctacgccctccgcaactacctccagacaaaggccgtcgtcacacccatcaagaaccccgcatggctgtaaatcacatcctccgtccttgcccgcacggcgctgcgccggttctcggagaacgtgacgaataaaacaaacggtttggttaaaaagacaaggacgacggaaaaaaaaaaaaaaaaaaaaaaaa

SEQ ID NO: 402 - protein, 550 aa, Zea mays
MAATVRRAASSVLSRFLLTKPSPSPASAAGNNSALLGSGAAALHRFSTAPASAAAAAEEPIQPAVEVKHTQLLINGNFVDAASGKTFPTLDPRTGEVIARVAEGDSEDIDRAVAAARRAFDEGPWPRMTAYDRCRVLLRFADLIERHAEEVAALETWDNGKTLAQAAGAEVPMVARCVRYYAGWADKIHGLVAPADGAHHVQVLHEPVGVAGQIIPWNFPLLMFAWKVGPALACGNTVVLKTAEQTPLSALYVANLLHEAGLPEGVLNVVSGFGPTAGAALSSHMGVDKLAFTGSTGTGQIVLELAARSNLKPVTLELGGKSPFIVMDDADVDQAVELAHQAVFFNQGQCCCAGSRTFVHERVYDEFVEKSKARALKRVVGDPFRDGVEQGPQIDGEQFNKILRYVQSGVDSGATLVAGGDRVGDRGFYIQPTVFADAKDEMKIAREEIFGPVQTILKFSGVEEVIRRANATPYGLAAGVFTRSLDAANTLSRALRAGTVWVNCYDVFDATIPFGGYKMSGVGREKGIYALRNYLQTKAVVTPIKNPAWL

SEQ ID NO: 403 - DNA, 1755 bp, Atriplex prostrata
  CDS (4)..(1506)
agaatggcgttcccaattcctgttcgtcaactcttcatcgatggggagtggagagaaccccttttaaaaaatcgcattcccatcatcaacccttctactgaagaaatcatcggtgatattcctgctgcaactgcagaggatgtagaggttgcagtagtagcagctagaaaagcatttaagaggaacaaaggtagagattgggctgcaacttctggtgctcatcgtgctaaatatttgcgtgctattgctgctaagataacagaaagaaaagatcatttcgttaaactggaaacccttgattctggaaaaccattcgatgaagccgtgttggacattgatgatgttgcttcatgctttgaatactttgctggtcaagcagaagctctggatgctaaacaaaaggctccagtcaccctgcctatggacagatttaaaagtcatgttctcaggcagcccattggtgttgttggattaatatccccatggaattatccacttctaatggctacatggaaaattgctcccgcacttgctgctggatgcacagctgtacttaaaccatcagaattggcatctgtgacttgtctagaatttggtgaagtgtgtaacgaagtgggacttcctccaggtgtgttgaatattttgacaggattaggtcctgatgctggtgccccaatagtatctcatcctgatattgataagattgcatttactgggagtagtgccactggaagcaagattatggcttctgctgcccaactagttaagcctgttacgttagagcttggaggtaaaagtcctgttatcatgttcgaagatattgatattgaaacagctgttgaatggactctttttggcgttttctggacaaatggtcaaatctgtagtgcaacatctagactgcttttgcatgaaagtattgcagctgaatttgttgataggatggtaaagtggacaaaaaacataaaaatttctgacccgtttgaagaaggatgccgacttggtcctgttatcagtaaaggacagtatgacaagattatgaagttcatatcaacagcaaagagtgaaggggctacaattttgtgtggaggctcccgccctgagcatttgaagaaagggtattatattgaacccaccattataactgatattaccacatccatgcaaatatggaaagaggaagtgtttggccctgtcatatgtgttaaaacatttaaaactgaagatgaagccattgaattggcaaatgatacagagtatggtttagctggtgccgtgttttctaaagatcttgaaagatgtgagagggtaactaaggctctagaagttggagctgtttgggttaattgctcacaaccatgctttgttcatgctccatggggaggagtgaagcgtagtggatttggacgtgaacttggggaatggggtatcgagaattacttgaatatcaagcaggtgactagcgatatttctgatgaaccatggggctggtacaagtctccttagagctgtgaggaatttgaacaccagcattattgtaaagtgaaatatggtgagactggaccttgaaatgattcacaaaggtctagtttaaagtatgaatggattgaataaaggttgtttgatgctggaattcgcttagcaaagcttaattttgttgtgtgtattattacttcagacaattgaatcggattagaaataagatgctacgtagtttgtcttttcaaaaaaaaaaaaaaaaaaaaaaaaaaaaaa

SEQ ID NO: 404 - protein, 500 aa, Atriplex prostrata
MAFPIPVRQLFIDGEWREPLLKNRIPIINPSTEEIIGDIPAATAEDVEVAVVAARKAFKRNKGRDWAATSGAHRAKYLRAIAAKITERKDHFVKLETLDSGKPFDEAVLDIDDVASCFEYFAGQAEALDAKQKAPVTLPMDRFKSHVLRQPIGVVGLISPWNYPLLMATWKIAPALAAGCTAVLKPSELASVTCLEFGEVCNEVGLPPGVLNILTGLGPDAGAPIVSHPDIDKIAFTGSSATGSKIMASAAQLVKPVTLELGGKSPVIMFEDIDIETAVEWTLFGVFWTNGQICSATSRLLLHESIAAEFVDRMVKWTKNIKISDPFEEGCRLGPVISKGQYDKIMKFISTAKSEGATILCGGSRPEHLKKGYYIEPTIITDITTSMQIWKEEVFGPVICVKTFKTEDEAIELANDTEYGLAGAVFSKDLERCERVTKALEVGAVWVNCSQPCFVHAPWGGVKRSGFGRELGEWGIENYLNIKQVTSDISDEPWGWYKSP

SEQ ID NO: 405 - DNA, 1901 bp, Zea mays
  CDS (111)..(1646)
gagacgagtcgagtgagggggcagaggccacaaaacagagagtacccaaacgatcgatctgtgcatctccccgtccgtcccgcaaccatctaattcagaagcagacatcaatggcgagcaacggctgcaacggcaacggcaacggcaacggcaacggcaaggcggctccggcgggtgtggtggtaccggagatcaagttcaccaagctcttcatcaacggcgagttcgtcgacgccgcctccggcaagacattcgataccagggacccacggaccggcgacgtgctggcccacgtagcagaggcagacaaagctgatgtggacctggcggtgaagtccgcccgggacgccttcgagcacggcaagtggccccgcatgtcaggctacgagcgcgggcggatcatgagcaagctggcggacctggtggagcagcacacggaggagctggcggcgctggacggtgccgacgccgggaagctgctgctgctgggcaagatcatcgacatccccgcggccacgcagatgctgcgctactacgccggcgccgccgacaagatccacggcgacgtcctgcgcgtctccggcaggtaccagggctacacgctcaaggagcctatcggcgtcgtgggcgtcatcatcccctggaacttccccaccatgatgttcttcctcaaggtcagcccggcgctcgccgcgggctgcaccgtcgtcgtcaagcccgccgagcagacgccgctttccgcgctctactacgcgcacctcgcaaagatggccggcgtccccgacggagtgatcaacgtcgtccccgggttcggccccaccgccggcgccgcgctcgcctcccacatggacgtcgacagcgtggccttcaccggctccacagaggtgggtcgcctcatcatggagtcggccgcgcggagcaacctcaagacggtctcgctggagctcggcggcaagtcgccgctcatcatcttcgacgacgccgacgtcgacatggccgttaacctgtcgaggcttgccgtcttcttcaacaagggagaggtttgcgtggcgggatcgcgcgtgtacgtgcaggaagggatctatgacgagttcgtcaagaaggccgtggaggccgcgcggagctggaaggttggagacccgttcgatgtcaccagcaacatgggccctcaggttgacaaggaccagtttgagagggtcctaaagtacattgagcatggcaagagcgagggagcgactctgctcaccggcggcaagcctgccgccgacaaagggtactacattgagcccaccatctttgtcgatgtcactgaggacatgaagatcgcgcaggaagagatcttcggccccgtcatgtccctcatgaagttcaagacggttgatgaggtgatcgagaaggccaactgcaccaggtacgggctcgccgccgggatcgtgaccaagagcctggacgtcgccaaccgggtgtcccggtcggtgcgcgccggcaccgtgtgggtgaactgctacttcgccttcgacccggacgcgcccttcggcgggtacaagatgagcggcttcggccgggaccaggggctggcagccatggacaagtacctgcaggtcaagagcgtcatcaccgcgctcccggactcgccatggtactgagttgagccagggaccgatggaaccccatcgatctcttcttgtgcagtgtacatgcgtcatgcgtgcgtgctcacacagctgggttgctgctttgtgcttgtgttcgtctctggtttgtggctcatgtgtgttagtctgcaccctatccttctgtacgtagctgccggacatgcaaatagtatgttaagtacaccatataaactcttgttttataaattcaagtttagcttggagccttcactcccttcagccttg

SEQ ID NO: 406 - protein, 511 aa, Zea mays
MASNGCNGNGNGNGNGKAAPAGVVVPEIKFTKLFINGEFVDAASGKTFDTRDPRTGDVLAHVAEADKADVDLAVKSARDAFEHGKWPRMSGYERGRIMSKLADLVEQHTEELAALDGADAGKLLLLGKIIDIPAATQMLRYYAGAADKIHGDVLRVSGRYQGYTLKEPIGVVGVIIPWNFPTMMFFLKVSPALAAGCTVVVKPAEQTPLSALYYAHLAKMAGVPDGVINVVPGFGPTAGAALASHMDVDSVAFTGSTEVGRLIMESAARSNLKTVSLELGGKSPLIIFDDADVDMAVNLSRLAVFFNKGEVCVAGSRVYVQEGIYDEFVKKAVEAARSWKVGDPFDVTSNMGPQVDKDQFERVLKYIEHGKSEGATLLTGGKPAADKGYYIEPTIFVDVTEDMKIAQEEIFGPVMSLMKFKTVDEVIEKANCTRYGLAAGIVTKSLDVANRVSRSVRAGTVWVNCYFAFDPDAPFGGYKMSGFGRDQGLAAMDKYLQVKSVITALPDSPWY

SEQ ID NO: 407 - DNA, 1757 bp, Zea mays
  CDS (61)..(1572)
gcggccgctgcacctcctttcccacgactcccgagcgctctgcgtgtggcgcgcggcagcatggcgactgcgaacgggagcagcaaggggtcgttcgaggtgcccaaggtggaggtcaggttcaccaagctcttcatcgacggcaagttcgtcgacgccgtctccggcaagacgttcgagacccgggaccctcgcaccggcgaggtgatcgccagcatcgcggagggaggcaaggccgacgtcgacctcgccgtcaaggccgcccgggaggccttcgacaacgggccctggcccaggatgacgggatacgagcgtggtcggatcctccacaggttcgcggacctgatcgacgagcacgtggaggagctggcggcgctggacacggtggacgccggcaagctgttcgccgtgggcaaggcgcgggacatcccgggcgccgcgcacctgctgcgctactacgccggcgccgccgacaaggtgcacggcgcgacgctcaagatggcgcagcggatgcacgggtacacgctcaaggagcccgtgggcgtggtgggccacatcgtgccctggaactaccccaccaccatgttcttcttcaaggtagggcccgcgctcgccgccggctgcgccgtcgtcgtcaagcccgccgagcagacgccgctgtccgcgctcttctacgcgcacctcgccagggaggccggcgtcccagccggcgtgctcaacgtcgtgccgggattcgggcccacggccggggccgccgtcgccgcccacatggacgtcgacaaggtcagcttcaccgggtccacggaggtcggccgcctcgtcatgagggccgcggccgagagcaacctcaagcccgtgtcgctcgagctgggcggcaagtctcccgtcatcgtcttcgacgacgccgacctcgacatggccgttaacctcgtcaacttcgccacctacaccaacaagggcgagatctgtgtggccggcacacgcatctacgtgcaggaagggatctacgacgagttcgtgaagaaggccgccgagctcgccagcaagtccgtggtcggagacccgttcaacccgagtgtcagccagggcccccaggttgacaaggaccagtacgagaaggtcctcaggtacattgacatcggaaagcgcgaaggcgccacgctggtcaccggagggaagccctgcggcgacaataagggctactacatcgagcccaccatcttcacggacgtcaaggacgacatgacgatcgcacaggatgaaatctttgggccggtgatggctctcatgaaattcaagaccgtggaggaggtgatccagaaagcgaacaacacccggtacggcctggccgccggcatcgtgaccaagaacatcgacgtcgccaacaccgtgtcgcggtccatccgcgccggcgccatctggatcaactgctacttcgcgttcgacccggacgcgccgttcggcgggtacaagatgagcgggttcggcaaggacatgggcatggacgcgctcgacaagtacctgcagaccaagaccgtcgtcactccgctgtacaacactccatggctctgaccgaccgacctctcatcctgtccgatgaacagttcaacatcacaaacaagaagaaacatgtcttgtaagatactcctccaaaggatcgggtgcctgtagctgtactcttacacctgcatggattgatgtcttgatgatgtagtgcaatgtagcattcagaacaataaagacatgtttcggactgc

SEQ ID NO: 408 - protein, 503 aa, Zea mays
MATANGSSKGSFEVPKVEVRFTKLFIDGKFVDAVSGKTFETRDPRTGEVIASIAEGGKADVDLAVKAAREAFDNGPWPRMTGYERGRILHRFADLIDEHVEELAALDTVDAGKLFAVGKARDIPGAAHLLRYYAGAADKVHGATLKMAQRMHGYTLKEPVGVVGHIVPWNYPTTMFFFKVGPALAAGCAVVVKPAEQTPLSALFYAHLAREAGVPAGVLNVVPGFGPTAGAAVAAHMDVDKVSFTGSTEVGRLVMRAAAESNLKPVSLELGGKSPVIVFDDADLDMAVNLVNFATYTNKGEICVAGTRIYVQEGIYDEFVKKAAELASKSVVGDPFNPSVSQGPQVDKDQYEKVLRYIDIGKREGATLVTGGKPCGDNKGYYIEPTIFTDVKDDMTIAQDEIFGPVMALMKFKTVEEVIQKANNTRYGLAAGIVTKNIDVANTVSRSIRAGAIWINCYFAFDPDAPFGGYKMSGFGKDMGMDALDKYLQTKTVVTPLYNTPWL

SEQ ID NO: 409 - DNA, 1455 bp, Agrobacterium tumefaciens
  CDS (1)..(1455): transl_table=11
atgatcaagctaaaaaatgcggcgctgttgcgtgatgcctgcctggtgaatggtcgctggctgaaagctgcggatggcaagacgattgcggtggaaaatcccgccaactcgatgatcatcggtcacgttccttcattgtcggcagatgaggttgaagctgcagtcgagtcagcaaacaaggcattttccgagtggagccgccgggctgcgaaggaccgcgctgccatattgcgtcgatggtttgatctcatggtggcgaacgctgacgatcttggtgcgttgatgactgccgagcaaggaaagccgtttgcggaagcaaggggcgaagccctttatgcggcatctttcgtggaatggttcgcggaggaagccaaacgtgtttacggcgatacaattccttcgccgaccacggacaagcgcattaccatcctgaagcagccgatcggtgtctgcgccgcgatcacgccatggaacttcccggccgcgatgatcacccgcaaggcggccccggcacttgccgcaggctgcacgatgatcgtcaaaccggctgagcagacccctctcaccgcacttgctctgggtgttcttgccgaagaagcgggcgttcccgccggtgtcttccaggtggtgacgggcgccgcacgcgatatcggcaaggtgtttaccgaaagcgacacggtgcgaaagatctcctttaccggatcgaccgaagtcggtcgtctgctgatggcgcaatcggccccgacgatcaagaaactgtcgctggaacttggtggcaatgcgcctttcatcgtctttgatgatgccgatctggatgcggccgttgagggtgcgatcgtgtcgaaataccgcaatgccggacagacctgcgtttgctccaaccggatctatgtccaggatggtgtttacgacgcattcgcggaaaagctggtcaaaagggtcgaaagcctgtccgtcggtgagggcacggaacctggtgttctgatcggtccactgatcgaccaggatgccgtggcaaaggtcgaggatcacgttgctgatgcccttggcaagggagcaaagatcgtcaccggtggaaagcgccatgctcttggaggcacgttttacgaaccaacggttctgactggtgcaacccaggccatgaaggtcgcccgtgaggagacctttggacccgtcgccccgctctttcggttcgggacggaagacgaagcggtcgccatggcgaacgacaccgaatttggtctggcggcctatttctacaccgagaatgtccgccggacatggcgtgtcgcagaagcgctcgaatacggcatggtgggccacaatacaggcctcatctccaacgaagtcgcaccattcggtggcgtgaagcagtccggcttgggccgcgaaggctcgcactacggcatcgatgaatatcttgaaatcaaatacctgtgctcggccatcggctga

SEQ ID NO: 410 - protein, 484 aa, Agrobacterium tumefaciens
MIKLKNAALLRDACLVNGRWLKAADGKTIAVENPANSMIIGHVPSLSADEVEAAVESANKAFSEWSRRAAKDRAAILRRWFDLMVANADDLGALMTAEQGKPFAEARGEALYAASFVEWFAEEAKRVYGDTIPSPTTDKRITILKQPIGVCAAITPWNFPAAMITRKAAPALAAGCTMIVKPAEQTPLTALALGVLAEEAGVPAGVFQVVTGAARDIGKVFTESDTVRKISFTGSTEVGRLLMAQSAPTIKKLSLELGGNAPFIVFDDADLDAAVEGAIVSKYRNAGQTCVCSNRIYVQDGVYDAFAEKLVKRVESLSVGEGTEPGVLIGPLIDQDAVAKVEDHVADALGKGAKIVTGGKRHALGGTFYEPTVLTGATQAMKVAREETFGPVAPLFRFGTEDEAVAMANDTEFGLAAYFYTENVRRTWRVAEALEYGMVGHNTGLISNEVAPFGGVKQSGLGREGSHYGIDEYLEIKYLCSAIG

SEQ ID NO: 411 - DNA, 1742 bp, Pisum sativum
  CDS (19)..(1530)
atccagatccaaacaaaaatggcaatcacagtatcaagtagacaattattcatagatggagagtggagagttcctatcctcaacaaaaggattccaaacatcaatccttccactgaaaacatcataggagatatacctgctgcaactaaggaagatgttgatcttgctgtggatgctgctaaaagagccatttccagaaaaaatggtagagattggtctgctgcttctggctctcttcgtgctcgctatcttcgagccattgctgctaagataaaagagaaaaaggatgaactagggaagctggaatcaattgactgtggaaaaccgctggaggaagcactagcggatctggatgatgttgttgcttgttttgagtactatgctgggcttgctgaagagttggattcaaagcaaaaagctcctatatctcttcctatggataccttcaaaagctatattctcaaggagcctattggtgttgttgcgttaataactccatggaactatcctttcttaatggcaacttggaaaattgctccggctctggcggctggttgtgctgcaatattgaagccgtctgaattggcatctgtgacctgtttggagttaggcgaaatatgcaaagaagttggtcttcctcgtggtgttttaaatattgtcaccggattaggccatgaagccggtgcttctttggcatctcatcctgatgtagataagatttcttttactggtagctctgcaactgggagcaagattatgacaactgcggcacagctagtcaagcctgtttcactagagcttggtggaaagagcccgatcgttgtttttgaggatgttgaccttgataaggttgctgagtggactggctttggctgtttctttactaatggtcagatatgcagtgcaacatcccgacttattgtgcacgaaagtatagccgtagaatttgtggataaacttgtcaaatgggccgaaaacatcaaaatttcggatccgttggaagaaggttgcaggcttggacctattgtcagtgaagcacagtataagaaagtattgaattgcatctcatcggctaagagtgagggtgcaacaattttgactggtggccgtcgacccgagcatttaaagaagggatattttgttgaaccaaccatcataaccgatgtgaccacctcgatgcaaatttggagagaagaagtatttggacctgtactcgccgtgaaaacatttagcaccgaggaagaagctattaatctcgcaaatgacactcactatggtttggggtctgctgtaatgtcaaacgatttagaaagatgcgagcgtctatctaaggctcttcaagctggaattgtatggattaattgtgctcagccaagcttcattcaagcaccatggggaggcattaaacgtagcggctttggccgcgaattaggagaatggggacttgagaactacttgagtgtgaagcaagttactaggtatacatcggatgagccgtggggctggtatcaaccaccttcaaagctgtgatagttaatcatatttctaaaatctggcatggaataagggtgtttgtgtgagaaacaccaagttatctggcatggaataagtttgtgtgagaaacaccaagttatgtaataatataccagcaacattgttgtgaattcccatttcccacggtgctttggttgatgatatgatatatagtttgaaatcaaaaaaaaaaaaaaaaaaaaaaaaaa

SEQ ID NO: 412 - protein, 503 aa, Pisum sativum
MAITVSSRQLFIDGEWRVPILNKRIPNINPSTENIIGDIPAATKEDVDLAVDAAKRAISRKNGRDWSAASGSLRARYLRAIAAKIKEKKDELGKLESIDCGKPLEEALADLDDVVACFEYYAGLAEELDSKQKAPISLPMDTFKSYILKEPIGVVALITPWNYPFLMATWKIAPALAAGCAAILKPSELASVTCLELGEICKEVGLPRGVLNIVTGLGHEAGASLASHPDVDKISFTGSSATGSKIMTTAAQLVKPVSLELGGKSPIVVFEDVDLDKVAEWTGFGCFFTNGQICSATSRLIVHESIAVEFVDKLVKWAENIKISDPLEEGCRLGPIVSEAQYKKVLNCISSAKSEGATILTGGRRPEHLKKGYFVEPTIITDVTTSMQIWREEVFGPVLAVKTFSTEEEAINLANDTHYGLGSAVMSNDLERCERLSKALQAGIVWINCAQPSFIQAPWGGIKRSGFGRELGEWGLENYLSVKQVTRYTSDEPWGWYQPPSKL

SEQ ID NO: 413 - DNA, 2128 bp, Hordeum vulgare
  CDS (82)..(1731)
tgaacccggaggacgagaagaattgattgctgatccggcgcaaaccaacagattcttcctgcctccgccgagatcatcatcatggctgctgccgccacgaggagggccgcctcctcgctcgtctcccgctgcctgctctccaggcccgcagcttcccccgccgctgtcccctctgcgctccgcagggcagatggggcacgtggattgttgcctggactccttcagaggttcggcactgcagcagcagcagaggaacccatctcgccttctgtccaagtgggcgagacacagctcctcatcaacggcaaattcgttgatgctgcatctggcaagactttcccgactctggaccctcgcaccggggaggtgattgcccgtgtgtctgaaggagatgccgaagatgtggaccgtgcagttgttgcggcccgcaaggcattcgatgaagggccatggccaaagatgactgcctatgagaggtcccggattcttttgcgatttgctgatttgatagagaaacacaatgatgaaattgctgcactggagacgtgggacaacgggaagccctatgagcaagctgcccacatcgaagtgccaatgcttgctcggcttatgcggtactatgcaggctggactgacaagatccatggcctcatcgtaccggctgatggcccgcaccatgtacaggtgctgcatgagccgattggtgtcgtgggtcagatcatcccgtggaacttcccacttttgatgtatggctggaaagttggccctgctttggcctgtgggaacactattgttctcaagaccgctgaacaaactcctctatctgccctctatgtttctaagctgttgcatgaggctggactacccgaaggtgtcctgaacatcatatctggttttggtcctaccgctggggctgctcttgctggccacatggacgttgacaagattgcattcactggatcaaccgatactgggaaagttattcttgagttatctgcacggagcaatcttaaggcagtgacactggagctaggaggcaagtctccttttatcgtcatggatgatgcagatattgaccaagctgttgagcttgcgcattttgcgctgtttttcaaccaggggcaatgctgctgcgctgggtctcgcacgttcgtacatgagcgtgtttatgatgagtttgttgagaagtcaaaggctcgtgctttgaagcgtgtagttggtgatccattcaggaaaggtgttgagcagggtcctcagattgatgatgagcaattcaagaagatcttgcgctacattaagtcgggtgtcgacagtggagccacccttgtgacgggtggtgacaagttgggtgacaaaggttactacatccagccaacaattttctcagatgtgcaggatgacatgaagatagcccaggaggagatattcgggcctgttcagtcaatcttcaagttcaatgacctcaacgaggtgatcaagagggcgaacgcaagccagtacggattggccgccggcgtttttaccaacaacctggacacggccaacaccttgacgcgtgccctcagggccggcacgatctgggtgaactgctttgacatcttcgatgccgcgatccccttcggcgggtacaagatgagcggcatcggtagggagaagggcatcgacagcctgaagaactacctgcaagtcaaggcggtcgtcaccgcgcttaagaaccctgcgtggttgtgagcatagcacacctatggtcttctgagtctgagataccggacaacgtgaagacgcagggacaattggatgagaaaaaaagaagatgatgatgataacaccgatgaggatctctaataagccattccttcatgggcagccagccaccgtctctaattagtatcatatgtgatttggtttcctttgtcaaccgcggcaagacatatatgttgtatgttgtagcaacattatgttgattatagcttgttggaaaaattctctggttgcagttaatcaacttcttttgatcagttgttgttctgcgacacatatgaagctaatggtgtttcctatcctagttaatccatgtccttgttgatcatcaaaaaaaaaaaaaaaaaaaaaaaaaaaaaaaaaaaaa

SEQ ID NO: 414 - protein, 549 aa, Hordeum vulgare
MAAAATRRAASSLVSRCLLSRPAASPAAVPSALRRADGARGLLPGLLQRFGTAAAAEEPISPSVQVGETQLLINGKFVDAASGKTFPTLDPRTGEVIARVSEGDAEDVDRAVVAARKAFDEGPWPKMTAYERSRILLRFADLIEKHNDEIAALETWDNGKPYEQAAHIEVPMLARLMRYYAGWTDKIHGLIVPADGPHHVQVLHEPIGVVGQIIPWNFPLLMYGWKVGPALACGNTIVLKTAEQTPLSALYVSKLLHEAGLPEGVLNIISGFGPTAGAALAGHMDVDKIAFTGSTDTGKVILELSARSNLKAVTLELGGKSPFIVMDDADIDQAVELAHFALFFNQGQCCCAGSRTFVHERVYDEFVEKSKARALKRVVGDPFRKGVEQGPQIDDEQFKKILRYIKSGVDSGATLVTGGDKLGDKGYYIQPTIFSDVQDDMKIAQEEIFGPVQSIFKFNDLNEVIKRANASQYGLAAGVFTNNLDTANTLTRALRAGTIWVNCFDIFDAAIPFGGYKMSGIGREKGIDSLKNYLQVKAVVTALKNPAWL

SEQ ID NO: 415 - DNA, 1808 bp, Pisum sativum
  CDS (126)..(1637)
tagagaataacactttatcttagctcagttgagtgaacaatttcagcaactttcaaggtgagatctgatctatctatctccatatccatcaaatcaataatagattggagagagaaagtactagaatggatattccgatcccaactcgtcagttgttcattaacggcgactggaaagctcccgtccttaacaaacggattcccgtcatcaatcccgccacccaaaacatcatcggcgatatccctgccgctactaaggaagacgtcgacgtcgccgtcgccgccgctaaaactgctctcacgcgtaacaaaggcgctgattgggctaccgcttctggcgctgttcgtgcacgctatctacgcgccattgccgctaaggttactgagaaaaagcctgaactagcgaagcttgagtctattgattgtggaaaaccactcgatgaagccgcgtgggacattgatgatgttgctggttgctttgagtattatgctgatcttgctgaaaaattggatgcaagacaaaaggctccggtgtctcttccaatggatacattcaagagtcatgtgcttagggaacctattggtgttgttggattgataactccatggaattatcctatgttgatggctacgtggaaggttgctcctgctcttgctgcgggctgtgctgcaatattgaagccgtctgaattggcatctctaacctgcttggagttaggcgaaatatgcaaagaagttggtcttcctcgtagtgttttaaatattgtcaccggattaggccatgaagccggtgctcctttggcatctcatcctgatgtagataagatttcttttactggtagctctgcaactgggagcaagattatgacaactgcagctcagctcgttaagcctgtttcactggagcttggtggaaaaagcccattagttgtttttgaggatgttgaccttgataaggctgctgaatgggccatctttggctgcttctggacaaatggtcagatatgcagtgcaacttcccgtcttattttacatgaaagtatagcaacagagtttttgaataggattgtcaaatggatcaaaaacatcaaaatttcagatcccttggaagaaggttgcagactaggacctgttgttagtgaaggacagtatgaaaaaatattgaagtttgtctcaaatgctaagagcgagggtgcaaccattttgactggtgggtctcgaccagagcatctaaagaaaggattctttattgaaccaaccatcataaccgacgtgactactaacatgcaaatttggagagaagaagtatttggacctgtcctctgtgtaaaaacatttagcactgaagaagaagctattgatctagcaaatgacactgtctatggcttaggtgctgctgtaatatcaaatgatctagaaagatgtgaacgcgttactaaggcttttaaggccggaattgtatgggtcaattgctctcaaccatgcttcactcaagctccatggggaggcgtcaaacgtagtggttttggccgtgaactaggagaatggggacttgacaattacttgagcgtgaagcaagtgactcagtatatctctgaggaaccatggggctggtaccagcctcctgcaaaactgtgataggcatctaaaaattcacacgagaataagggttgggtcataccaaattatggccgatcttgaaatgagaaggcatataaagtcttgtaaaacagtgtaactggttgtactcaagtttatgcttgtagtgtttttatttgacttggttttaaaaaaaaaaaaaaaaaaaaa

SEQ ID NO: 416 - protein, 503 aa, Pisum sativum
MDIPIPTRQLFINGDWKAPVLNKRIPVINPATQNIIGDIPAATKEDVDVAVAAAKTALTRNKGADWATASGAVRARYLRAIAAKVTEKKPELAKLESIDCGKPLDEAAWDIDDVAGCFEYYADLAEKLDARQKAPVSLPMDTFKSHVLREPIGVVGLITPWNYPMLMATWKVAPALAAGCAAILKPSELASLTCLELGEICKEVGLPRSVLNIVTGLGHEAGAPLASHPDVDKISFTGSSATGSKIMTTAAQLVKPVSLELGGKSPLVVFEDVDLDKAAEWAIFGCFWTNGQICSATSRLILHESIATEFLNRIVKWIKNIKISDPLEEGCRLGPVVSEGQYEKILKFVSNAKSEGATILTGGSRPEHLKKGFFIEPTIITDVTTNMQIWREEVFGPVLCVKTFSTEEEAIDLANDTVYGLGAAVISNDLERCERVTKAFKAGIVWVNCSQPCFTQAPWGGVKRSGFGRELGEWGLDNYLSVKQVTQYISEEPWGWYQPPAKL

SEQ ID NO: 417 - DNA, 1868 bp, Zea mays
  CDS (149)..(1798)
cctcctctgcctgccgcttctcctgctgcgggcgggcactgctgcaagtactagaggaggacatccgcttccattactgcgcctgcggaggatcggaggaaccagtggcggaggcttcgattttcggcgggcgcaataaatttcccgcatggctcggagggccgcgtcctcgctcgtctcccgctgcctcctggcgagggcccctgccggcgcgccgcccgctgccccctctgcgccgcgcaggacagtgcctgcagatgggatgcacaggctgttgccaggtgtccttcagaggttcagcactgcagcagcagtagaggagcccatcacgccgtcagtccatgtgaactacacaaagctcctcattaatgggaactttgttgattccgcatccggcaagaccttcccaactctggaccctcgtacaggggaggtgattgctcatgtggctgagggtgacgcagaggacattaaccgtgcagtagctgcggctcgcaaggcttttgatgaagggccatggccgaagatgactgcctatgagaggtcccgtatcctactgcggtttgctgatttgatagagaagcacaatgacgagcttgctgctttggagacatgggacaacgggaagccatatgagcaagcagcccagattgaagtacccatggtggcccgtcttatgcgttactatgctggttgggctgataagatccatgggctcattgtgccggctgatggcccacaccatgtacagatcttgcatgagccaattggtgttgcaggtcagatcatcccatggaactttcctcttctgatgtatgcctggaaagttggccctgctttggcatgtggaaatactctcgtgctcaagactgctgaacaaacccctctatcggctttgtatatctccaaattgttgcatgaggctggactacctgagggtgttgtgaatgtcgtttctggttttggccctactgctggtgctgctcttgctagtcacatggatgttgataagatcgcatttactggatctaccgatactggaaaaattattctcgagttggctgcaaagagcaaccttaagacagtgacactggagttaggaggcaagtcctctttcatcataatggacgatgctgatgttgaccatgctgttgagcttgcgcactttgccctgttctttaaccagggacaatgctgctgcgctggatctcgcacgtttgtacatgagcgtgtttatgatgagtttgtggagaaggccaaggctcgtgcattgaagcgcgtcgttggtgatccgttcaggaaaggtgttgaacagggcccgcagattgacgacgagcaattcaaaaagatcttgcgctacattaggtatggtgttgacggtggagctacccttgtgacgggtggtgataggttgggtgacaagggtttctacatccagccaacgattttctcagatgtccaggacggcatgaagattgctcaggaggagatatttgggcctgtgcagtcgatcctcaagttcaaagacctcaatgaggttatcaagagggcaaacgcgagccagtatggattggccgccggcgtgttcaccaacagcctggacacggccaacaccctgacgcgcgcgctcagggccgggaccgtctgggtgaactgcttcgacgtcttcgatgctgcgattccgtttggcgggtacaagatgagcggcatggggagggagaagggcgttgacagcctgaagaactacctgcaggtgaaggcggtcgtcaccccaatcaagaacgccgcgtggttgtagacgctgcaagtgtggccttgtgcacgagaaccacgtatattcatttcctggtcacatccccgaacaatgt

SEQ ID NO: 418 - protein, 549 aa, Zea mays
MARRAASSLVSRCLLARAPAGAPPAAPSAPRRTVPADGMHRLLPGVLQRFSTAAAVEEPITPSVHVNYTKLLINGNFVDSASGKTFPTLDPRTGEVIAHVAEGDAEDINRAVAAARKAFDEGPWPKMTAYERSRILLRFADLIEKHNDELAALETWDNGKPYEQAAQIEVPMVARLMRYYAGWADKIHGLIVPADGPHHVQILHEPIGVAGQIIPWNFPLLMYAWKVGPALACGNTLVLKTAEQTPLSALYISKLLHEAGLPEGVVNVVSGFGPTAGAALASHMDVDKIAFTGSTDTGKIILELAAKSNLKTVTLELGGKSSFIIMDDADVDHAVELAHFALFFNQGQCCCAGSRTFVHERVYDEFVEKAKARALKRVVGDPFRKGVEQGPQIDDEQFKKILRYIRYGVDGGATLVTGGDRLGDKGFYIQPTIFSDVQDGMKIAQEEIFGPVQSILKFKDLNEVIKRANASQYGLAAGVFTNSLDTANTLTRALRAGTVWVNCFDVFDAAIPFGGYKMSGMGREKGVDSLKNYLQVKAVVTPIKNAAWL

SEQ ID NO: 419 - DNA, 1909 bp, Hordeum vulgare
  CDS (69)..(1589)
actcctgctacggcacggcaccaccaccgtcaccacccaggcgcccacctcgccggagcagagtagccatggccgcgcccccagcgatcccgcgccgcggcctcttcatcggcggcgggtggcgcgagcccaccctgggccgccgcatccccgtcatcaacccggccaccgaggacaccatcggcgacatcccggcagccaccgcggaggacgtcgagctcgccgtcgcggccgcgcggtccgcgttcttgctcgacggcgggagccgctgggcgcgcgcttccggggccacgcgtgccaagtatctgaacgcgatcgccgctaagattaaagaaaagatatcgtatctggcattgctggagacagttgattctggaaagcccaaggatgaagcagttgctgacatggacgatgtcgctgcatgctttgagtactatgctgctctggctgaagccttagatggaaaacaacatgcaccaatctctctgcccatggaagaattcaagacctatgttcttaaagaacccatcggggttgttggactcatcactccctggaactatcctctgttgatggctacttggaaggttgcacctgccctggctgctgggtgtacagctgtgttaaaaccatctgagctggcatctctaacttgcttagagctcggcgcaatatgtgaagagataggactgccttcaggagttctgaacataattactggtctgggccctgacgcaggtgctccaatagcttcacatccccatgtggataagatcgcttttacaggaagtactgcaactggtaagacgataatgaccgctgctgctcaaatggttaagcctgtttcattagagcttggtggcaaaagtcctcttgttatctttgatgatgttgctgacattgacaaagctgttgaatgggccatgtttggttgttttttcaatggtggtcaagtttgcagtgcaacttctcgcctacttctccatgagaaaattgcagagcgatttttggatagacttgtcgaatgggcaaagaatataaaaatctcagacccactagaagaaggttgcaggctgggttcagtcatcagtaaagggcagtatgaaaagatcaagaagttcatctcaacagcaagaagtgaaggtgctacaattttgcatgggggtgaccgaccaaagaatctcggaaaagggttcttcattgaacccactattataacaggcgttagcacatcaatgcaaatttggagagaggaagtctttggaccagtcatctgtgtgaaagtattcaagacagagagcgaagccgtcgagcttgcaaatgatacgcactatggcttggctggtggtgtgatctctgatgatctagagaggtgtgagcgtatcgcaaaggttattcactctggaattgtttggataaactgctcgcaaccgactctggttcaagctccgtggggagggaacaagcggagtggtttcggccgggagctaggagaatggggcctcgagaactacctgagcgtgaaacaagtcaccaggtactgcaaagatgagctatacggttggtaccagcgcccatccaagctgtagatgacttgagagttgagacgaggcgtccatgtcatgagaatggagcctcgttcactggaggacgggatgaatcctgatcttgtgcacggggggagacttctgtacagcggtttcgcaataatgccattgtatgtatggcaaacttggttatggacttatggtagcgcgtgtcgtcgagcctgtgacagatgtggttgatcagaactcagaaacttgctagagtaaaaacgacattacgttctgctgctttcgttgtatggcaatatctgtttacgtccttttaatgagagctcatctgcgaatgtggtgcaaaaaaaaaa

SEQ ID NO: 420 - protein, 506 aa, Hordeum vulgare
MAAPPAIPRRGLFIGGGWREPTLGRRIPVINPATEDTIGDIPAATAEDVELAVAAARSAFLLDGGSRWARASGATRAKYLNAIAAKIKEKISYLALLETVDSGKPKDEAVADMDDVAACFEYYAALAEALDGKQHAPISLPMEEFKTYVLKEPIGVVGLITPWNYPLLMATWKVAPALAAGCTAVLKPSELASLTCLELGAICEEIGLPSGVLNIITGLGPDAGAPIASHPHVDKIAFTGSTATGKTIMTAAAQMVKPVSLELGGKSPLVIFDDVADIDKAVEWAMFGCFFNGGQVCSATSRLLLHEKIAERFLDRLVEWAKNIKISDPLEEGCRLGSVISKGQYEKIKKFISTARSEGATILHGGDRPKNLGKGFFIEPTIITGVSTSMQIWREEVFGPVICVKVFKTESEAVELANDTHYGLAGGVISDDLERCERIAKVIHSGIVWINCSQPTLVQAPWGGNKRSGFGRELGEWGLENYLSVKQVTRYCKDELYGWYQRPSKL

SEQ ID NO: 421 - DNA, 1889 bp, Hordeum vulgare
  CDS (47)..(1558)
gaccccgtcaacaaccaccacgcaagctcactccccgcccgccgcgatggtcgcgccggccaagatcccgcagcggcagctcttcatcgacggcgagtggcgcgcgcccgcgctcggccgccgcctccccgtcatcaacccgaccaccgaggtctccatcggcgagatcccggcgggcacctcggaggacgtggacgccgcggtggcggccgcgcgggccgccctcaagaggaaccgcggccgcgactggtcccgcgcccccggcgccgtccgggccaagtacctccgcgcaatcgccgccaagatgattgagcggaaatctgatctggctaggctagaggcacttgattgcgggaagcctcttgatgaagcggcatgggacatggacgatgttgccggctgctttgagttcttcgcaggtcatgctgaagccttggacaaaaggcaaaatgctgcagttgctctcccggagaattttaaatgccatcttaagaaggaacctattggtgtagttgctctaatcacaccatggaactatcctctcctgatggctgtatggaaggtagcccctgctctggcagctggttgtacagctgtactgaaaccatctgaattagcttccgtgacttgcttagagcttggtgatgtgtgtaaagaggtcggtcttccatcaggtgtcttaaacattgtgactggactaggtaatgaagctggtgctcctttgtcatcacaccctgacgtcgacaaggttgcatttaccgggagctatgcaaccggtcaaaagattatggttgctgcagctcctacagtcaagcctgttacattggagcttggtggcaaaagtcctattgtagtatttgatgatgtcgacattgacaaagctgttgagtggactctatttgggtgcttttggaccaatggtcagatttgtagtgcgacatctcgtcttcttatccataaaaatatcgctaaagaattcgttgacaggatggttgcatggtccaaaaatatcaaggtgtcagacccgctcgaggagggttgcaggcttgggccagttgttagtgaaggacagtatgagaagatcaagaagttcgtagcgaatgctaaaactgaaggtgcgaccattctcactgggggtgtcaggcccaagcatctggagaaaggtttcttcattgaacccacaatcatcactgacatcaacacatcaatggagatttggagggaggaagtctttggtccagtcctgtgtgtgaaggaattttctaccgaagaggaagccatcgaactggccaacgatactcattatggtctggctggtgccgtgatttccggtgaccgtgagcgatgccagagattggctgaggagatcgaggcgggatgcatctgggtgaactgctcgcagccttgcttctgccaagctccgtggggtgggaacaagcgcagcggctttgggcgagagctcggagaagggggcattgataactacctgagcatcaagcaggtgacggagtacacatctgatgcgccgtggggatggtacaaggctccggctaactaagatgcaattgagctgtttcgaggacctgtatctgttccatcaggataaatctgtgtgccggcctttgtagtggtgagaataaatgtaatttgccatggactactactggacctttcttgcaaaataaatggcatgggttttgtggacatagggtgtgtgacaaggatttattttgcaaaattaaggtgtttggaatatctccaacaattccccagtctatatcaatgctgtctatatcgatgatgtgaatgttatcatcggctacgcaaattgaggatgtaaaggaagctaggtcttaccttaaagacgagtttgagataaaaaaaaaaaa

SEQ ID NO: 422 - protein, 503 aa, Hordeum vulgare
MVAPAKIPQRQLFIDGEWRAPALGRRLPVINPTTEVSIGEIPAGTSEDVDAAVAAARAALKRNRGRDWSRAPGAVRAKYLRAIAAKMIERKSDLARLEALDCGKPLDEAAWDMDDVAGCFEFFAGHAEALDKRQNAAVALPENFKCHLKKEPIGVVALITPWNYPLLMAVWKVAPALAAGCTAVLKPSELASVTCLELGDVCKEVGLPSGVLNIVTGLGNEAGAPLSSHPDVDKVAFTGSYATGQKIMVAAAPTVKPVTLELGGKSPIVVFDDVDIDKAVEWTLFGCFWTNGQICSATSRLLIHKNIAKEFVDRMVAWSKNIKVSDPLEEGCRLGPVVSEGQYEKIKKFVANAKTEGATILTGGVRPKHLEKGFFIEPTIITDINTSMEIWREEVFGPVLCVKEFSTEEEAIELANDTHYGLAGAVISGDRERCQRLAEEIEAGCIWVNCSQPCFCQAPWGGNKRSGFGRELGEGGIDNYLSIKQVTEYTSDAPWGWYKAPAN

SEQ ID NO: 423 - DNA, 1717 bp, Avicennia marina
  CDS (16)..(1506)
cccacgcgtccgcggatgccgacgcggcagctgttcatcgacggcgagtggcgagaacccgtccaaagaaaacgcattccgatcatcaaccccgccaacgaacaaactattggggatattccggcagctactgctgaagagatggatattgctgtggaagctgctcggaaagcatttttccgtaacagtggcaaagattggtcctcgacgactggggcacatcgagccaagtatttacgagccattgctgcaaagattaaagacaggaaagtagaactagtggaacttgaagcaattgatagtgggaaaccattggaagaagcatctttggatatggataatgtcattggatgttttgagtattttgctggcattgctgaaagattggattcagagcaaaggacacctgtttctttaccaatggaaacgttcaagtgtcatcttctaaaagaacccattggcgttgttggtttgatctcgccatggaattaccctctgttaatggcaatatggaaagttgcccctgccctagcatctggatgcactgctatacttaaaccatctgaactagcatcagtaacgtgtttggaattggctgaagtgtgtatggaggtgggtcttccacctggtgtactcaacattttgactggtttggggccagaagctggtgctccattggttactcatcctcatgttgccaagatttcatttacggggagtgatactacgggagtcaaaattatgactgctgctgcccaacttgtgaaaccagttacgttggagcttggtggaaaaagcccaatcgttgtgtttgaagatgttgaccttgatacagctgctgagtggaccctcttcggttgcttttggacaaatggtcagatatgcagtgctacttctcgactcttggtgcatgaaagcatagcgacaacattcttggagaagcttgtgaaatggtgcgagaaaattaaaatatcagaccccttagaggaaggttgcaggcttggccctattgttagtcgacggcagtatgagaaagtgatgaagtacatctcaacagctaaggaggaaggtgccacgatcttatgtggaggtgcacgacctgagcatttagagaaaggttactttgttcaaccaactattataacagacgtgaagacttccatgcaaatctggatagaggaagtatttggacctgttctttgcgttaaaacatttgcaactgaagatgaagccgttgaactggcaaatgatacccattatggtcttgctgctgcagtaatatcgaaggatcttgataggtgtgagcgaatggctaaggcatttcaagtcggagccgtctgggtcaactgctcacagccttgcttctaccaagccccatggggaggcaaaaagcggagtggttttgggcgtgaacttggggaacggggactggacatctacttgaacgtaaagcaggtcacacggtatgtttctagtgagccatggggttggtacaagtctccttgaaagccatggaaaactttccagatccctggaagtgcgcaagaataaaatggagaaaaagaagcttttgaattggcagtactatggtactgttagacgatagacttgtactgttgtgctttggtcaattcctgaaaaaatccctctgcggaacacaagagtatcattcagaaccgaagtcaattttattttgtgccaaaaaaaaaaaaaaaaa

SEQ ID NO: 424 - protein, 496 aa, Avicennia marina
MPTRQLFIDGEWREPVQRKRIPIINPANEQTIGDIPAATAEEMDIAVEAARKAFFRNSGKDWSSTTGAHRAKYLRAIAAKIKDRKVELVELEAIDSGKPLEEASLDMDNVIGCFEYFAGIAERLDSEQRTPVSLPMETFKCHLLKEPIGVVGLISPWNYPLLMAIWKVAPALASGCTAILKPSELASVTCLELAEVCMEVGLPPGVLNILTGLGPEAGAPLVTHPHVAKISFTGSDTTGVKIMTAAAQLVKPVTLELGGKSPIVVFEDVDLDTAAEWTLFGCFWTNGQICSATSRLLVHESIATTFLEKLVKWCEKIKISDPLEEGCRLGPIVSRRQYEKVMKYISTAKEEGATILCGGARPEHLEKGYFVQPTIITDVKTSMQIWIEEVFGPVLCVKTFATEDEAVELANDTHYGLAAAVISKDLDRCERMAKAFQVGAVWVNCSQPCFYQAPWGGKKRSGFGRELGERGLDIYLNVKQVTRYVSSEPWGWYKSP

SEQ ID NO: 425 - DNA, 1844 bp, Avicennia marina
  CDS (124)..(1632)
  misc_feature (595)..(595): n is a, g, c or t
  misc_feature (1401)..(1401): n is a, g, c or t
  misc_feature (1674)..(1674): n is a, g, c or t
  misc_feature (1678)..(1678): n is a, g, c or t
gaggtcgacggtatcgataagcttgattgcaggcttggtcccattattagtagaggacagtatgagatatagcggcgccacacagagtgggggggctggttgacggagagagatatctcagtaatggcgattcgaataccgagtcggcaactgtttatcgacggcaaatggagagaacccgtcaacagaaaacgccttccgattgtcaatcccgccaccgaagaaaccatcggggatattccggcagctacggctgaagatgtaaatattgctgtggaagctgctcggaaagcgttctttcacaacggggggaaagattgggccacggcaagtggcgcccatcgtgcgaagtatttacgggccattgctgcaaaggttactgaaaagaaagaagaactagcaaaacttgaagtactagattgtgggaaaccactggaggaggcagcttgggatatggatgatgttgctggatgttttgaatattttgctgaccttgctgaaagattggattcaaatcaaattcctgtttctcttccaatggacacatttaaatgtcatgttctgaaagaacccattggtgtagttggtttagtcnctccatggaattaccctctgttaatggcaacatggaaagttgcccctgccctagctgctggatgtactgcaatacttaaaccatctgaaatagcatctgtcacttgcctggagttggctcaagtgtgtaaggaggtgggtcttccagctggtgttctcaacattttgactggtttagggccagaagctggtgctcctttggcatctcatcctcatgttgacaagataacattcactgggagtggtgccacaggaagcaaaattatgactgctgctgcccaacttgtgaaaccagttacattggagcttggtgggaaaagtccaattgttgtgtttgaggatgttgaccttgatacagctgctgagtggaccctcttcggttgcttttggacaaatggtcagatatgcagtgctacttctcgactcttggtgcatgaaagcatagcgacaacattcttggagaagcttgtgaaatggtgcgagaaaattaaaatatcagaccccttagaggaaggatgcaggcttggtcccattattagtagaggacagtatgaaaaagtgatgaagttcatctcaacagctaaggaggaaggtgccacgatcttatgtggaggtgcacgacctgagcatttagagaaaggttactttgttcaaccaactataataacagacgtgaagacttccatgcaaatctggatagaggaagtctttggaccagttcttggggttaaaacatttagcaaggaagatgaaccctttgaactagcaaatgatccccattatggttgggctgctgctgtattatcncaagatctggaaaggtgtgagcggatgactaaggcatttcaagcaggcattgtctgggtcaactgctcacagccttgcttctgccaagctccttggggaggtaaaaagcggagtggttttggccgtgatcttggggaatggggacttgacaactacttgaacgtaaagcaggtcacacggtatgtttctagtgagccatgggattggtacaagtctccttccaagctgtgaaatcttttcccaggtcgttggtgggtcttgaatctaaaccantcantgaaacggtgcataaagtctgtaaaatgacaggattattctactcttacatgacgaacatgtactgctgtgatgatgttgtgtgacagttgcaatgcataagacaagagtatgctgaaagaacactaagtaaaactcattttttccataaaaaaaaaaaaaaaaaa

SEQ ID NO: 426 - protein, 502 aa, Avicennia marina
  misc_feature (158)..(158): The Xaa at location 158 stands for Ala, Pro, Ser, or Thr.
MAIRIPSRQLFIDGKWREPVNRKRLPIVNPATEETIGDIPAATAEDVNIAVEAARKAFFHNGGKDWATASGAHRAKYLRAIAAKVTEKKEELAKLEVLDCGKPLEEAAWDMDDVAGCFEYFADLAERLDSNQIPVSLPMDTFKCHVLKEPIGVVGLVXPWNYPLLMATWKVAPALAAGCTAILKPSEIASVTCLELAQVCKEVGLPAGVLNILTGLGPEAGAPLASHPHVDKITFTGSGATGSKIMTAAAQLVKPVTLELGGKSPIVVFEDVDLDTAAEWTLFGCFWTNGQICSATSRLLVHESIATTFLEKLVKWCEKIKISDPLEEGCRLGPIISRGQYEKVMKFISTAKEEGATILCGGARPEHLEKGYFVQPTIITDVKTSMQIWIEEVFGPVLGVKTFSKEDEPFELANDPHYGWAAAVLSQDLERCERMTKAFQAGIVWVNCSQPCFCQAPWGGKKRSGFGRDLGEWGLDNYLNVKQVTRYVSSEPWDWYKSPSKL

SEQ ID NO: 427 - DNA, 1749 bp, Avicennia marina
  CDS (28)..(1539)
  misc_feature (1589)..(1589): n is a, g, c or t
  misc_feature (1729)..(1729): n is a, g, c or t
ggcaccaggcagcgatctcattcatacatgtcaacgatggcaatccggatgccgacgcggcagctgttcatcgacggcgagtggcgagaacccgtccaaagaaaacgcattctgatcattaaccccgccaacgaacaaactattggggatattccggcagctactgctgaagatgtggatattgctgtggaagctgctcggaaagcatttttccgtaacagtggcaaagattggtcctcgacgactggggcacatcgagccaagtatttacgagccattgctgcaaagattaaagacaggaaagcagaactagtgaaacttgaagcaattgatagtgggaaaccattggtagaagcatctttggatatggatgatgtcattggatgttttgagtattttgctggcattgctgaaagattggattcagagcaaaggacacctgtttctttaccaatggaaacgttcaagtgtcatcttctaaaagaacccattggcgttgttggtttgatctcgccatggaattaccctctgttaatggcaatatggaaagttgcccctgccctagcatctggatgcactgctatacttaaaccatctgaactagcatcagtaacgtgtttggaattggctgaagtgtgtatggaggtgggtcttccacctggtgtactcaacattttgactggtttggggccagaagctggtgctccattggttactcatcctcatgttgccaagatttcatttacggggagtgatactacgggagtcaaaattatgactgctgctgcccaacttgtgaaaccagttacgttggagcttggtggaaaaagcccaatcgttgtgtttgaagatgttgaccttgatacagctgctgagtggaccctcttcggttgcttttggacaaatggtcagatatgcagtgctacttctcgactcttggtgcatgaaagcatagcggcaacattcttggagaagcttgtgaaatggtgcgagaaaattaaaatatcagaccccttagaggaaggttgcaggcttggccctattgttagtcgacggcagtatgagaaagtgatgaagtacatctcaacagctaaggaggaaggtgccacgatcttatgtggaggtgcacgacctgagcatttagagaaaggttactttgttcaaccaactataataacagacgtgaagacttccatgcaaatctggatagaggaagtttttggaccagttctttgcgttaaaacatttgcaactgaagatgaagccattgacctggcaaatgatacccattatggtcttgctgctgcagtaatatcgaaggatcttgataggtgtgagcgaatggctaaggcatttcaagtcggagccgtctgggtcaactgctcacagccttgcttctaccaagccccatggggaggcaaaaagcggagtggttttgggcgtgaacttggggaacggggactggacatctacttgaacgtaaagcaggtcacacagtatgtttctagtgagccatgggattggtacaagtctccttgaaagccatggaaaactttccagatccctggaagtgcgcaagaataaaatgnagaaaaaaagttttgaaattggcagtactatcgtactgttagatgatagacttgtactgttgtgctttggtcaattcctgaaaaatgccctttgcggaacacaagagtctcattcagaaccgaagtcattttttttgtgncaaaaaaaaaaaaaaaaaaa

SEQ ID NO: 428 - protein, 503 aa, Avicennia marina
MSTMAIRMPTRQLFIDGEWREPVQRKRILIINPANEQTIGDIPAATAEDVDIAVEAARKAFFRNSGKDWSSTTGAHRAKYLRAIAAKIKDRKAELVKLEAIDSGKPLVEASLDMDDVIGCFEYFAGIAERLDSEQRTPVSLPMETFKCHLLKEPIGVVGLISPWNYPLLMAIWKVAPALASGCTAILKPSELASVTCLELAEVCMEVGLPPGVLNILTGLGPEAGAPLVTHPHVAKISFTGSDTTGVKIMTAAAQLVKPVTLELGGKSPIVVFEDVDLDTAAEWTLFGCFWTNGQICSATSRLLVHESIAATFLEKLVKWCEKIKISDPLEEGCRLGPIVSRRQYEKVMKYISTAKEEGATILCGGARPEHLEKGYFVQPTIITDVKTSMQIWIEEVFGPVLCVKTFATEDEAIDLANDTHYGLAAAVISKDLDRCERMAKAFQVGAVWVNCSQPCFYQAPWGGKKRSGFGRELGERGLDIYLNVKQVTQYVSSEPWDWYKSP

SEQ ID NO: 429 - DNA, 2135 bp, Oryza sativa
  CDS (188)..(1837)
ccacgcgtccgattcaaagcaaagccgccattactgctcctcttccattccactggggacgtacgagctccgcgcatcccttccattccattactgaccttggctgctgcggctgcagtgcagagggggtttggtggtgcggttgatttgagcaataaattctctaggggggagggaggtatcggtcatggctgccgctgctgcaaggaggggctcatcgctgctctctcgctgcctgctgtccaggcccgccgccgccgcctcgcctgctgtcccctctgcgctccgcagggcagatgggacacaaggattgttgccgggaatccttcagaggttcagcactgcagcagtagcagaggagcccatatcacccccagtccaagtgaactacactcagctcctcattgatggaaaattcgttgattcagcatctggcaaaactttcccaactctggaccctcgtaccggggagctgattgcccatgtggctgaaggcgatgcggaggatattaaccgtgcggttcatgcggcccgcaaggctttcgatgaagggccatggccaaagatgactgcctatgagagatcccggattctgttgcggtttgctgacttgattgagaagcacaacgatgaaattgctgcattggagacatgggacaacggcaagccgtatgcgcaagctgcccagattgaagtaccaatggtggcacggctgatgcggtactatgctggttgggctgacaagatccatgggcttgtcgtgccggctgacggcccacaccatgtacaggtgctgcacgagcccattggtgtcgcaggtcagatcatcccatggaactttccgcttctgatgtttgcgtggaaagttggccctgctttggcttgtggaaacactgttgtgctcaagacggctgagcaaactcctctgtctgctctatttgcttctaagctgttgcatgaggctggactcccagacggtgttgttaacgtggtatctggttttggacctactgctggtgctgctcttgctagtcacatggatgtcgataagattgcattcactggatcgaccgatactggaaaagtcgtccttgagttggctgcaaggagcaaccttaagtcagtgacactggagctaggaggcaagtctcctttcatcatcatggatgatgctgatgttgaccatgctgttgagcttgcgcattttgcactgttctttaaccagggacaatgttgctgtgctgggtctcgtacatttgtgcatgagcgtatctatgatgagttcgtggagaaggccaaggctcgtgctctcaagcgtgtggttggtgatccattcaagaatggtgttgaacagggccctcagattgatgacgagcaattcaacaagatcttgcgctacatcaagtatggtgttgacagtggagccaaccttgtgactggtggcgacagattaggtgacaaaggttactacatccagccaacaattttctcggatgtacaggataacatgaggattgctcaagaagagatatttggccctgtgcagtccattctgaagttcaatgatctgaacgaggtcatcaagagggcaaatgcaagccagtacgggctggctgctggggtcttcaccaacaacctgaacacggccaacaccctgacccgcgcgctcagggtcgggaccgtgtgggtgaactgcttcgacgtcttcgacgccgcgatcccgttcggcggatacaagcagagcggcatcgggagggagaagggcatcgacagcctgaagaactacctgcaggtcaaggccgtcgtcacgccgatcaagaacgccgcgtggttgtaaacacatagatgtttggacatttcagaactggggaagaaataggtataatcttatggacggatgcgaaaatggcgataaattatggcgataagattatgatgatgatgatgaagaagaagaagaggaggaggaagaacagctgaaataagcttgtcctagcatggggctggcattgtctctaataaaccttgtggttggtgctcatgttactgatggagtatattgtagaagcagatttatgttcattatgaaatatatatcgcttgtttgggataattctaaaaaaaaaaaaaaaaaa

SEQ ID NO: 430 - protein, 549 aa, Oryza sativa
MAAAAARRGSSLLSRCLLSRPAAAASPAVPSALRRADGTQGLLPGILQRFSTAAVAEEPISPPVQVNYTQLLIDGKFVDSASGKTFPTLDPRTGELIAHVAEGDAEDINRAVHAARKAFDEGPWPKMTAYERSRILLRFADLIEKHNDEIAALETWDNGKPYAQAAQIEVPMVARLMRYYAGWADKIHGLVVPADGPHHVQVLHEPIGVAGQIIPWNFPLLMFAWKVGPALACGNTVVLKTAEQTPLSALFASKLLHEAGLPDGVVNVVSGFGPTAGAALASHMDVDKIAFTGSTDTGKVVLELAARSNLKSVTLELGGKSPFIIMDDADVDHAVELAHFALFFNQGQCCCAGSRTFVHERIYDEFVEKAKARALKRVVGDPFKNGVEQGPQIDDEQFNKILRYIKYGVDSGANLVTGGDRLGDKGYYIQPTIFSDVQDNMRIAQEEIFGPVQSILKFNDLNEVIKRANASQYGLAAGVFTNNLNTANTLTRALRVGTVWVNCFDVFDAAIPFGGYKQSGIGREKGIDSLKNYLQVKAVVTPIKNAAWL

SEQ ID NO: 431 - DNA, 1659 bp, Cladosporium fulvum
  CDS (61)..(1554)
gagtgagtactactgtgttttcctttgagataccccagcacccaaaagtaattggccatcatgtctctttccgtccagctcgagacgccgtctgccggcaagtacgagcagccaactggccttttcatcaacaatgagtgggtgaagccagtcagcggcaagttcttcgatgtcatcaacccaaccgacgagtccgtcatctgccaagtcgcagaggccgatgagaaggatgtcgacatcgccgtcgccgccgcccgcaaggccttcgagggcccatggagacaagagaccccagagaaccgcggcaagctcctcgtgaagctcgccgagctcttcgagaagaacctcgacctcttcgcctccgtcaaggcgctcgacaacggaaaggcgttcaacatggccaaggttgacattggcatgtgcgctggctgcctccgatactacggtggctgggccgacaagattgagggcaaggtcgtcgacaccactccagataccttcaactacatcaagaaggagccaatcggtgtgtgcggtcagatcatcccatggaacttcccactcctcatgtgggcatggaagattggtccagccgttgccactggtaacaccgttgtcatcaagactgctgagcagactcctcttggtgcctacgttgccgccaacctcatcaaggaggccggcttcccaccaggtgtcgtcaacgtcatctctgggttcggaaaggtcgccggtgccgccattgcatcgcacatggacatcgacaaggttgctttcaccggttccaccgtcactggacgcaccatcctcaaggctgccgctggctccaacttgaagaaggtcaccctcgagctcggtggcaagtcgcccaacattgtcttcgacgatgctgacattgacaacgccatctcatgggtcaacttcggtatcttcttcaaccacggccagcgctgctgtgctggttcgcgtatctacgtccaggagggcatttacgacaagttcttgcagcgattcaaggagcgcgcacagaagaacgttgttggtgacccattcgccgccgacaccttccagggcccacaagtctcgcaggtgcaattcgaccgcatcatgggctacatccaggcaggccgtgacgccggtgccaccgtcgagatcggcggtaaccgcaagggtgacaagggttacttcatcgagccaacaatcttcgccaacgtcaccgaggacatgaagatcatgcaagaggagatcttcggcccagtgtgctccatctccaagttcaagaccaaggaggacgccatcaaggtcggtaacgccaccccctacggtctcgccgccgctgtccacaccaggaacctcaacaccgccatcgaggtctcgaatgctctccgcgccggtaccgtctgggtcaacacctacaacactctgcaccaccagcttccattcggtggcttcaaggagtccggtattggacgtgagcttggtgaggatgcgttggccaactacacacagaccaagactgtgtcgatccgtctgggtgatgctctcttcggttaagcgtatgatgggaaggggggtgagcgatgctcttcgatgtatttacgtcatgaacctatgatgacaggaaagattatgtaaagaagaaattgaacaagagcttcc

SEQ ID NO: 432 - protein, 497 aa, Cladosporium fulvum
MSLSVQLETPSAGKYEQPTGLFINNEWVKPVSGKFFDVINPTDESVICQVAEADEKDVDIAVAAARKAFEGPWRQETPENRGKLLVKLAELFEKNLDLFASVKALDNGKAFNMAKVDIGMCAGCLRYYGGWADKIEGKVVDTTPDTFNYIKKEPIGVCGQIIPWNFPLLMWAWKIGPAVATGNTVVIKTAEQTPLGAYVAANLIKEAGFPPGVVNVISGFGKVAGAAIASHMDIDKVAFTGSTVTGRTILKAAAGSNLKKVTLELGGKSPNIVFDDADIDNAISWVNFGIFFNHGQRCCAGSRIYVQEGIYDKFLQRFKERAQKNVVGDPFAADTFQGPQVSQVQFDRIMGYIQAGRDAGATVEIGGNRKGDKGYFIEPTIFANVTEDMKIMQEEIFGPVCSISKFKTKEDAIKVGNATPYGLAAAVHTRNLNTAIEVSNALRAGTVWVNTYNTLHHQLPFGGFKESGIGRELGEDALANYTQTKTVSIRLGDALFG

SEQ ID NO: 433 - DNA, 1617 bp, Arabidopsis thaliana
  CDS (1)..(1617)
atggcggctcgtagagtgtcttctcttttatctcgatctttttcagcttcctctcccttactgtttcgttctcaagggagaaattgttacaatggagggatcttaaggagatttggaacctcttctgctgctgctgaggaaatcataaacccatctgttcaagtttctcacacacagctcctcatcaatgggaactttgttgactctgcttctggtaagacgtttccgactcttgatccgaggacaggcgaagtcattgctcatgtagctgaaggcgatgctgaagatatcaatcgagctgtgaaagctgcaaggacggcctttgatgaaggaccttggcctaaaatgagtgcttatgaaaggtcaagagttttgttgaggtttgcagatttggttgagaaacacagcgaagagctcgcgtctctagagacatgggacaatggcaagccttaccaacaatccttgaccgcagagattcccatgtttgcaagattgttccgttactatgctggatgggcggataagattcatggactaacaattccagctgatggaaactatcaagttcacacattacatgaaccgataggtgtagctggacagatcataccgtggaattttccacttttgatgtttgcttggaaagttggtcctgctcttgcttgtggtaacaccattgtcctcaaaaccgctgagcaaacacctctcacggctttctatgctggaaagcttttccttgaagcgggtcttcctcctggtgttctgaatattgtttcgggattcggtgcaacagcaggtgctgccctcgcgagtcatatggatgtagacaagcttgcttttacaggatcgactgatacggggaaagttatacttggattggctgctaacagcaatcttaagcccgtaactctggaacttggagggaaatcaccgttcatcgtattcgaagatgctgatattgataaagctgtagagcttgcacactttgccctcttcttcaaccaggggcaatgttgctgcgcggggtctcggacatttgttcatgagaaagtgtatgatgagtttgttgagaaatcaaaggcacgcgcattgaaacgtgttgttggtgatcctttcaggaaaggcattgaacagggtcctcagatcgatttgaagcaatttgagaaagtgatgaagtacataaagtcaggtatcgaaagcaatgctactcttgaatgtggtggtgatcagattggagacaaaggttacttcatccaacctactgtcttctctaatgttaaggatgacatgcttatcgctcaagacgagattttcggtccagtccaatcgatcttgaagttcagtgatgtggatgaggtgataaagagggcgaacgagacgaagtacgggctagcggcaggggttttcacgaagaatctggacacggcaaacagggtttcaagggctttgaaagctggtaccgtatgggttaactgcttcgacgtatttgatgcagccataccatttggtggttacaagatgagtgggaatgggagagagaaaggcatatacagtctcaataattacttgcagatcaaggcagtcgtcactgctctaaataagcctgcctggatctga

SEQ ID NO: 434 - protein, 538 aa, Arabidopsis thaliana
MAARRVSSLLSRSFSASSPLLFRSQGRNCYNGGILRRFGTSSAAAEEIINPSVQVSHTQLLINGNFVDSASGKTFPTLDPRTGEVIAHVAEGDAEDINRAVKAARTAFDEGPWPKMSAYERSRVLLRFADLVEKHSEELASLETWDNGKPYQQSLTAEIPMFARLFRYYAGWADKIHGLTIPADGNYQVHTLHEPIGVAGQIIPWNFPLLMFAWKVGPALACGNTIVLKTAEQTPLTAFYAGKLFLEAGLPPGVLNIVSGFGATAGAALASHMDVDKLAFTGSTDTGKVILGLAANSNLKPVTLELGGKSPFIVFEDADIDKAVELAHFALFFNQGQCCCAGSRTFVHEKVYDEFVEKSKARALKRVVGDPFRKGIEQGPQIDLKQFEKVMKYIKSGIESNATLECGGDQIGDKGYFIQPTVFSNVKDDMLIAQDEIFGPVQSILKFSDVDEVIKRANETKYGLAAGVFTKNLDTANRVSRALKAGTVWVNCFDVFDAAIPFGGYKMSGNGREKGIYSLNNYLQIKAVVTALNKPAWI

SEQ ID NO: 435 - DNA, 1636 bp, Arabidopsis thaliana
  CDS (1)..(1605)
atggcatcaagaagagtttcttcgctgctctctcgctctttcatgtcctcctcacgttctatcttctctcttagaggcatgaacagaggagctcaaagatacagtaacctcgctgctgctgtcgaaaacactattactccaccagtgaaagttgaacacacacagcttctaatcggtggaagattcgttgatgcagtgtcaggaaaaactttccctactttggatccaagaaatggagaagtgattgctcaagtgtctgaaggtgatgcagaagacgtgaaccgcgcggttgcagctgcacgaaaggcttttgatgaaggaccatggcctaaaatgacagcttatgagagatcaaagatactgtttcgtttcgctgatttaatcgagaaacataatgatgagattgctgctcttgagacttgggataatgggaaaccttatgaacaatctgctcaaattgaagtaccaatgcttgctagggtgttccggtactatgctggttgggcagacaagatacatggaatgacaatgccaggagatggtccacaccatgtgcagaccttacatgagcctataggagtcgctggacaaatcatcccatggaacttccctcttctcatgctttcttggaaacttggaccagctttagcttgcggtaacaccgttgttctcaaaactgctgagcaaactcctctatctgctcttcttgttgggaaactacttcatgaggctggacttcctgatggagttgtgaatatagtttctggatttggggctactgctggtgcagctatagctagtcacatggacgttgataaggttgctttcaccgggtctactgatgttgggaagattattcttgagttagcttcaaaaagcaaccttaaggcagtgactcttgagcttggaggaaagtcaccattcattgtatgtgaagatgctgatgtggatcaggccgttgagcttgcacatttcgctttgttctttaaccagggacaatgttgttgtgctggttcgcgtacatttgtacatgaacgtgtgtatgatgagtttgtagagaaagctaaagctcgtgcactcaagcgaaatgttggagatcccttcaagtcaggcattgagcaaggtccccaggtagactcagagcaattcaacaaaatcctgaagtacatcaaacatggagttgaggctggagccacattacaagctggaggtgacaggcttggttccaagggttactacattcaacctactgtcttctcagatgtgaaagatgacatgctcatagcaacagacgagattttcgggccggttcaaaccatactgaaattcaaggatcttgatgaggtgattgcaagggccaacaactcaaggtacggtttagctgctggagtgttcacacagaatcttgacacagcacaccggctgatgcgagcactcagagttgggactgtttggatcaactgttttgatgtacttgatgcatcaattccatttggagggtataagatgagtggcattggtagagagaaaggtatctacagtctcaacaattacttgcaagtcaaggctgttgttacttccctcaagaaccctgcctggctctaaaccataccaggtggttacacttatttctcga

SEQ ID NO: 436 - protein, 534 aa, Arabidopsis thaliana
MASRRVSSLLSRSFMSSSRSIFSLRGMNRGAQRYSNLAAAVENTITPPVKVEHTQLLIGGRFVDAVSGKTFPTLDPRNGEVIAQVSEGDAEDVNRAVAAARKAFDEGPWPKMTAYERSKILFRFADLIEKHNDEIAALETWDNGKPYEQSAQIEVPMLARVFRYYAGWADKIHGMTMPGDGPHHVQTLHEPIGVAGQIIPWNFPLLMLSWKLGPALACGNTVVLKTAEQTPLSALLVGKLLHEAGLPDGVVNIVSGFGATAGAAIASHMDVDKVAFTGSTDVGKIILELASKSNLKAVTLELGGKSPFIVCEDADVDQAVELAHFALFFNQGQCCCAGSRTFVHERVYDEFVEKAKARALKRNVGDPFKSGIEQGPQVDSEQFNKILKYIKHGVEAGATLQAGGDRLGSKGYYIQPTVFSDVKDDMLIATDEIFGPVQTILKFKDLDEVIARANNSRYGLAAGVFTQNLDTAHRLMRALRVGTVWINCFDVLDASIPFGGYKMSGIGREKGIYSLNNYLQVKAVVTSLKNPAWL

SEQ ID NO: 437 - DNA, 1614 bp, Arabidopsis thaliana
  CDS (33)..(1538)
agagagagagagagaaatacaaagaaaaataaatggagaacggcaaatgcaacggagccacgacggtgaagttaccggagatcaaattcaccaagcttttcatcaacggccagttcattgatgctgcttcagggaagacgtttgagacgatagaccctaggaacggtgaagtgatcgcaacaatagccgaaggagacaaagaagacgttgacttggccgttaacgctgcacgttacgccttcgaccatggtccttggcctcgcatgaccggcttcgagagggcaaagcttataaacaaattcgcagacttaatagaggaaaacattgaagaattggctaaacttgatgcggttgacggtggaaaattgttccaattggggaaatatgctgatattccggccacagccggtcattttcgatacaatgcgggtgcagcggataaaatccacggcgagactcttaaaatgacgcgtcaatcgttgtttggatacaccctcaaagaaccaattggagtggttggtaatatcatcccttggaatttcccaagcattatgtttgccacaaaggtagctccggctatggctgctggttgcaccatggtggtcaagccagctgaacagacttcactctctgctttgttctatgcccatctctcaaaagaagcgggaattcctgatggtgtgctcaacattgtaactggttttggatcaactgctggagctgccattgcctcccatatggacgtagacaaagttagtttcactgggtcaacagatgttggaaggaagataatgcaagccgcagccgcaagtaatctcaaaaaagtttcccttgaattaggcgggaaatcgccacttctcatattcaacgacgctgatattgacaaagccgccgatcttgcgcttctcggttgcttttacaacaagggtgaaatttgcgtggcgagctctcgtgtgtttgttcaagaaggtatatacgataaggttgtggagaagttagtagagaaggctaaagattggaccgttggtgatccttttgattccactgctcgacaaggacctcaagtggataaaagacagtttgagaagattctatcttacattgagcacggtaaaaacgaaggagcgaccttattaactggaggaaaagccattggagacaaaggatatttcatccaaccaactatattcgcagatgtcactgaggatatgaagatataccaagatgaaatctttggaccagtcatgtcactgatgaaattcaagacggtagaggaagggatcaaatgcgcaaacaacacgaaatacggtcttgcagcaggaatactaagccaagacatagacttgatcaacacggtttcgaggtcaatcaaagctggaatcatttgggttaattgctacttcgggtttgatcttgactgtccttatggtggctacaagatgagtggtaattgtcgtgaaagtggcatggacgctctcgacaactatctacaaaccaaatccgtcgttatgcctcttcacaattccccttggatgtaataaaattgtccataacacatagaaaaaaacttaatccaatgataataaggcggcttgaattaaaaaaaaaaaaaaa

SEQ ID NO: 438 - protein, 501 aa, Arabidopsis thaliana
MENGKCNGATTVKLPEIKFTKLFINGQFIDAASGKTFETIDPRNGEVIATIAEGDKEDVDLAVNAARYAFDHGPWPRMTGFERAKLINKFADLIEENIEELAKLDAVDGGKLFQLGKYADIPATAGHFRYNAGAADKIHGETLKMTRQSLFGYTLKEPIGVVGNIIPWNFPSIMFATKVAPAMAAGCTMVVKPAEQTSLSALFYAHLSKEAGIPDGVLNIVTGFGSTAGAAIASHMDVDKVSFTGSTDVGRKIMQAAAASNLKKVSLELGGKSPLLIFNDADIDKAADLALLGCFYNKGEICVASSRVFVQEGIYDKVVEKLVEKAKDWTVGDPFDSTARQGPQVDKRQFEKILSYIEHGKNEGATLLTGGKAIGDKGYFIQPTIFADVTEDMKIYQDEIFGPVMSLMKFKTVEEGIKCANNTKYGLAAGILSQDIDLINTVSRSIKAGIIWVNCYFGFDLDCPYGGYKMSGNCRESGMDALDNYLQTKSVVMPLHNSPWM

SEQ ID NO: 439 - DNA, 1521 bp, Saccharomyces cerevisiae
  CDS (1)..(1521)
atgcctaccttgtatactgatatcgaaatcccacaattgaaaatctctttaaagcaaccgctagggttgtttatcaacaatgagttttgtccatcatcagatggaaagaccatcgaaactgtgaacccagctactggcgaaccgataacatccttccaagcagctaacgaaaaggatgtagacaaagctgtgaaagctgccagggctgcttttgataacgtttggtcgaagacatcttctgagcaacgtggtatttatctttcaaacttattaaaacttattgaggaggagcaagacacacttgccgcattagagactttagacgctggaaagccttaccattcaaatgccaaaggtgatttggcacaaattttacagcttaccagatattttgctgggtccgctgataagtttgacaaaggtgcaaccataccattgacttttaacaagtttgcatatactctaaaagttccttttggcgttgttgctcaaatcgttccatggaattatcctctagctatggcttgttggaaattgcaaggtgccttagcagccggtaacacggttatcatcaaacctgctgagaatacctctctatctctactttattttgctactttaattaaaaaagcaggttttccacctggtgttgtcaatatcgttcctggttatggatcacttgtaggccaagccctagcatctcacatggatatcgacaaaatatcttttacgggaagcaccaaggtcggtggatttgtgttggaagcttccggccaatcgaaccttaaagacgttacactagaatgcggtggtaagtctcctgctctcgtatttgaagatgcagaccttgataaggctatcgattggatagcagctggcattttctacaattcaggacagaattgtaccgcaaactcaagagtttatgttcaaagttcgatctacgacaagtttgttgaaaagtttaaagaaactgcaaagaaggagtgggatgttgcaggaaaatttgatccgtttgatgagaaatgcatcgttggtccagttatatcaagtacacagtatgaccgcatcaaaagttacatagaacgtggtaaaagggaggaaaagttggacatgttccagacctctgaatttcctattggtggagctaaaggctacttcattcccccaaccatcttcactgatgtcccgcaaacatcgaaactgttacaggatgagatatttggcccggttgtggttgttagcaagttcacaaattatgatgacgctctgaagctggctaatgatacttgctacgggctcgcctctgcggtcttcacaaaagatgtcaagaaagcgcacatgtttgctcgcgatattaaagcaggaactgtttggatcaactcatctaacgatgaagatgttaccgttccttttggcgggtttaaaatgagtggtattggtagagaactggggcaaagtggtgttgatacctatcttcaaacaaaagcagttcacataaatctctctttggacaactaa

SEQ ID NO: 440 - protein, 506 aa, Saccharomyces cerevisiae
MPTLYTDIEIPQLKISLKQPLGLFINNEFCPSSDGKTIETVNPATGEPITSFQAANEKDVDKAVKAARAAFDNVWSKTSSEQRGIYLSNLLKLIEEEQDTLAALETLDAGKPYHSNAKGDLAQILQLTRYFAGSADKFDKGATIPLTFNKFAYTLKVPFGVVAQIVPWNYPLAMACWKLQGALAAGNTVIIKPAENTSLSLLYFATLIKKAGFPPGVVNIVPGYGSLVGQALASHMDIDKISFTGSTKVGGFVLEASGQSNLKDVTLECGGKSPALVFEDADLDKAIDWIAAGIFYNSGQNCTANSRVYVQSSIYDKFVEKFKETAKKEWDVAGKFDPFDEKCIVGPVISSTQYDRIKSYIERGKREEKLDMFQTSEFPIGGAKGYFIPPTIFTDVPQTSKLLQDEIFGPVVVVSKFTNYDDALKLANDTCYGLASAVFTKDVKKAHMFARDIKAGTVWINSSNDEDVTVPFGGFKMSGIGRELGQSGVDTYLQTKAVHINLSLDN

SEQ ID NO: 441 - DNA, 1521 bp, Saccharomyces cerevisiae
  CDS (1)..(1521)
atgcctaccttgtatactgatatcgaaatcccacaattgaaaatctctttaaagcaaccgctagggttgtttatcaacaatgagttttgtccatcatcagatggaaagaccatcgaaactgtgaacccagctactggcgaaccgataacatccttccaagcagctaacgaaaaggatgtagacaaagctgtgaaagctgccagggctgcttttgataacgtttggtcgaagacatcttctgagcaacgtggtatttatctttcaaacttattaaaacttattgaggaggagcaagacacacttgccgcattagagactttagacgctggtaagcctttccattccaatgctaaacaagacttagcccagattatagaacttacaagatactatgcgggggcggtcgacaagttcaatatgggtgaaaccattccattgacttttaacaagtttgcatatactctaaaagttccttttggcgttgttgctcaaatcgttccatggaattatcctctagctatggcttgtagaaaaatgcaaggtgccttagcggccggtaacacggttatcatcaaacctgctgaaaatacctctctatctctactttattttgctactttaattaaaaaagcaggttttccacctggtgttgtcaatgtcattcctggttatggttccgttgtggggaaagctttaggaacccacatggatatcgacaaaatatcttttacgggaagtactaaggttggcggctcagtattggaagcttccggccaatcgaaccttaaggatatcacactagaatgcggtggtaagtctcctgctcttgtatttgaagatgcagaccttgataaggctatagaatgggtagcaaatggtattttttttaattcgggacagatctgcactgcaaactcaagagtttatgttcaaagttcgatctacgacaagtttgttgaaaagtttaaagaaactgcaaagaaggagtgggatgttgcaggaaaatttgatccgtttgatgagaaatgcatcgttggtccagttatatcaagtacacagtatgaccgcatcaaaagttacatagaacgtggtaaaaaggaggaaaagttggacatgttccagacctctgaatttcctattggtggagctaaaggctacttcattcccccaaccatcttcactgatgtaccagaaacatctaagttgctgcgtgatgaaatatttggcccggttgtggttgttagcaagttcacaaattatgatgacgctctgaagctggctaatgatacttgctacgggctcgcctctgcggtcttcaccaaagatgtcaagaaagcgcacatgtttgctcgcgatattaaagcaggaactgtttggatcaatcaaaccaatcaagaagaagctaaagttccttttggcggatttaagatgagtggtattggtagagaatcaggcgacaccggcgttgataactatttacaaataaaatcagtccatgtggatctttcattggataaataa

SEQ ID NO: 442 - protein, 506 aa, Saccharomyces cerevisiae
MPTLYTDIEIPQLKISLKQPLGLFINNEFCPSSDGKTIETVNPATGEPITSFQAANEKDVDKAVKAARAAFDNVWSKTSSEQRGIYLSNLLKLIEEEQDTLAALETLDAGKPFHSNAKQDLAQIIELTRYYAGAVDKFNMGETIPLTFNKFAYTLKVPFGVVAQIVPWNYPLAMACRKMQGALAAGNTVIIKPAENTSLSLLYFATLIKKAGFPPGVVNVIPGYGSVVGKALGTHMDIDKISFTGSTKVGGSVLEASGQSNLKDITLECGGKSPALVFEDADLDKAIEWVANGIFFNSGQICTANSRVYVQSSIYDKFVEKFKETAKKEWDVAGKFDPFDEKCIVGPVISSTQYDRIKSYIERGKKEEKLDMFQTSEFPIGGAKGYFIPPTIFTDVPETSKLLRDEIFGPVVVVSKFTNYDDALKLANDTCYGLASAVFTKDVKKAHMFARDIKAGTVWINQTNQEEAKVPFGGFKMSGIGRESGDTGVDNYLQIKSVHVDLSLDK

SEQ ID NO: 443 - DNA, 2060 bp, Saccharomyces cerevisiae
  CDS (501)..(2060)
cgaccctctggttagatgacactcctgccccaactgccacgaatctgtaaccccataactatacccgtacgcagtactaaaaatgtatgtaattagtaaatgtatgtaacaatttcaccgttttgtgtaacaattcattcattcattcttttgatcctttagtaccgtccgcacatgatgtcatttccccctcatttttgtttgctggtatgattccccgcccgggcgacggtacggctgttatccagcgatgcgggacttccgtccacaggtatctttttctccaactccaacagagatggaaaatgaggggcgggtgtaggtaagcagaatgaggagaaatttgtaatgaaaatggaagttcggcggttatataaatggggggggtttgtcggtgacaattgacttcactctcctttcctcaaaaattcttgggtgttaggattagaagtatctggaaaaccaaccaagaaaactacaataacaaaaataaataaagcatgttcagtagatctacgctctgcttaaagacgtctgcatcctccattgggagacttcaattgagatatttctcacaccttcctatgacagtgcctatcaagctgcccaatgggttggaatatgagcaaccaacggggttgttcatcaacaacaagtttgttccttctaaacagaacaagaccttcgaagtcattaacccttccacggaagaagaaatatgtcatatttatgaaggtagagaggacgatgtggaagaggccgtgcaggccgccgaccgtgccttctctaatgggtcttggaacggtatcgaccctattgacaggggtaaggctttgtacaggttagccgaattaattgaacaggacaaggatgtcattgcttccatcgagactttggataacggtaaagctatctcttcctcgagaggagatgttgatttagtcatcaactatttgaaatcttctgctggctttgctgataaaattgatggtagaatgattgatactggtagaacccatttttcttacactaagagacagcctttgggtgtttgtgggcagattattccttggaatttcccactgttgatgtgggcctggaagattgcccctgctttggtcaccggtaacaccgtcgtgttgaagactgccgaatccaccccattgtccgctttgtatgtgtctaaatacatcccacaggcgggtattccacctggtgtgatcaacattgtatccgggtttggtaagattgtgggtgaggccattacaaaccatccaaaaatcaaaaaggttgccttcacagggtccacggctacgggtagacacatttaccagtccgcagccgcaggcttgaaaaaagtgactttggagctgggtggtaaatcaccaaacattgtcttcgcggacgccgagttgaaaaaagccgtgcaaaacattatccttggtatctactacaattctggtgaggtctgttgtgcgggttcaagggtgtatgttgaagaatctatttacgacaaattcattgaagagttcaaagccgcttctgaatccatcaaggtgggcgacccattcgatgaatctactttccaaggtgcacaaacctctcaaatgcaactaaacaaaatcttgaaatacgttgacattggtaagaatgaaggtgctactttgattaccggtggtgaaagattaggtagcaagggttacttcattaagccaactgtctttggtgacgttaaggaagacatgagaattgtcaaagaggaaatctttggccctgttgtcactgtaaccaaattcaaatctgccgacgaagtcattaacatggcgaacgattctgaatacgggttggctgctggtattcacacctctaatattaataccgccttaaaagtggctgatagagttaatgcgggtacggtctggataaacacttataacgatttccaccacgcagttcctttcggtgggttcaatgcatctggtttgggcagggaaatgtctgttgatgctttacaaaactacttgcaagttaaagcggtccgtgccaaattggacgagtaa

SEQ ID NO: 444 - protein, 519 aa, Saccharomyces cerevisiae
MFSRSTLCLKTSASSIGRLQLRYFSHLPMTVPIKLPNGLEYEQPTGLFINNKFVPSKQNKTFEVINPSTEEEICHIYEGREDDVEEAVQAADRAFSNGSWNGIDPIDRGKALYRLAELIEQDKDVIASIETLDNGKAISSSRGDVDLVINYLKSSAGFADKIDGRMIDTGRTHFSYTKRQPLGVCGQIIPWNFPLLMWAWKIAPALVTGNTVVLKTAESTPLSALYVSKYIPQAGIPPGVINIVSGFGKIVGEAITNHPKIKKVAFTGSTATGRHIYQSAAAGLKKVTLELGGKSPNIVFADAELKKAVQNIILGIYYNSGEVCCAGSRVYVEESIYDKFIEEFKAASESIKVGDPFDESTFQGAQTSQMQLNKILKYVDIGKNEGATLITGGERLGSKGYFIKPTVFGDVKEDMRIVKEEIFGPVVTVTKFKSADEVINMANDSEYGLAAGIHTSNINTALKVADRVNAGTVWINTYNDFHHAVPFGGFNASGLGREMSVDALQNYLQVKAVRAKLDE

SEQ ID NO: 445 - DNA, 2661 bp, Saccharomyces cerevisiae
  CDS (902)..(2461)
attggttgctgtcattatcaactttatattaagattgaagtacaatgacgctaacactaagttatgaaattgtaattccaatatcgtaagcgtgggttacgcacaaactgtattttcaagatgctcacaaataatttagtttcatatatacgcatatatagaaagtatccatctataggtaatcatgaacaataaaaatattcacgtttcaggagctattgtttgtactcattacgtttttggatatcaagttgaaaatcagcccctttcactagatatcaagcgctataaaaaaattttaatttcgatgaggcatctttcttttctcttgtggctatgtaagcctaagaagccgtttacacatcaatgataaataagtatacaaaaagggttccatttttttttttggccgctaccggactagcaagggcctaatggtacgctgagcgtagtacaacaaagcgcttgttagccgtagagttaagctcttgactactattacggtaaaagccgggaacgtgcgtaacaatttttttttgcattaggttaaagaggctcgctcgcggacgctttagaataccgcttaaggcgccaaaagatggaagctattctctttcttttttttttcacaaactgagaggggttgtgtatcgttaaaaatgttggaagacttctgactcatcactacgcagattgttagagtttttcgatgagaatggcttcaaagaacagaacaaaacacgattatataagccccatgtaaaaagaacgtcttaatttattttgaatttaggacttcttgacatttttagcatatataacaatacgataagtgtctcatcaaacgtggttaagacagaaaacttcttcacaacattaacaaaaagccaaagaagaagaaatgctttctcgcacaagagctgcagctccgaattccagaatattcactagaagcttgttacgtctttattctcaagcaccattacgcgttccaattactcttccaaatggtttcacctacgaacagccaacagggttattcactaatggtgaatttgttgcctcgaagcaaaagaaaacgtttgacgtgatcaatccatctaacgaagaaaagataacaactgtatacaaggctatggaagatgatgttgatgaagccgttgcagcgctaaaaaagcttttgaaacgaagtgtctattgtagagccggagttcgcgctaaagctttattcaatctcgctgacttggttgagaaacaccaagaaacactggctgccattgagtcaatggataatggtaagtcattgttttgtgcgcgcggtgacgtcgctttagtatctaaatacttgcgttcttgcggtggttgggcagataaaatctacggtaacgttattgacacaggtaaaaaccattttacctactcaattaaggaaccattaggcgtttgcggccaaataatcccttggaacttccctttattgatgtggtcatggaaaattgggcctgctctggctacaggtaacaccgtcgtattgaaacccgctgaaacaacacctttatctgcccttttcgcttcccagttgtgtcaggaagcaggcatacccgctggtgtagtcaatatccttccgggttccggtagagttgttggagaaagattgagtgcacacccagacgtgaagaagattgcttttacaggctctactgccaccggccgccatattatgaaggtcgctgccgatactgtcaagaaagtcactttggagctgggaggtaaatcaccaaatattgtgtttgctgacgctgatctagataaagccgtcaagaacattgccttcggtattttttacaactctggtgaagtttgctgcgctggttccagaatatacattcaagatacagtatacgaggaggtgttgcaaaaactaaaggattacaccgagtcactaaaggtcggtgacccatttgatgaggaagttttccaaggtgctcaaacatctgacaaacagctgcataaaattttagactatgtcgatgtagcaaaatcagagggggctcgtcttgtgactggaggggccagacatggcagtaaaggttattttgtcaagccaacagtgtttgctgatgtcaaagaagatatgagaattgttaaggaggaagtgtttggtcccattgtaactgtatccaagttttctactgttgatgaagtgattgctatggcaaatgattctcaatatgggttagccgcaggtattcacactaacgatattaacaaggctgttgatgtgtccaaaagagtgaaagctggtactgtttggataaatacctataacaacttccaccaaaatgttcctttcggtggcttcggccagtcaggtattggccgtgaaatgggtgaggctgctttaagtaactacactcaaacaaaatctgtcagaattgccattgacaagccaattcgttgaagtaactcaggcccgagttgactgctcattgaaggtatgtatgataaacattatagaataatgaaaaatgaccttccggttggaaccaattaaccaaggaattaaaaattccttaaaccaaagggaattaattaatttccaaaaaaaaaaaaaaccaaaaccaaaaaaaattaaattaaaccggtggattaataaacctt

SEQ ID NO: 446 - protein, 519 aa, Saccharomyces cerevisiae
MLSRTRAAAPNSRIFTRSLLRLYSQAPLRVPITLPNGFTYEQPTGLFTNGEFVASKQKKTFDVINPSNEEKITTVYKAMEDDVDEAVAALKKLLKRSVYCRAGVRAKALFNLADLVEKHQETLAAIESMDNGKSLFCARGDVALVSKYLRSCGGWADKIYGNVIDTGKNHFTYSIKEPLGVCGQIIPWNFPLLMWSWKIGPALATGNTVVLKPAETTPLSALFASQLCQEAGIPAGVVNILPGSGRVVGERLSAHPDVKKIAFTGSTATGRHIMKVAADTVKKVTLELGGKSPNIVFADADLDKAVKNIAFGIFYNSGEVCCAGSRIYIQDTVYEEVLQKLKDYTESLKVGDPFDEEVFQGAQTSDKQLHKILDYVDVAKSEGARLVTGGARHGSKGYFVKPTVFADVKEDMRIVKEEVFGPIVTVSKFSTVDEVIAMANDSQYGLAAGIHTNDINKAVDVSKRVKAGTVWINTYNNFHQNVPFGGFGQSGIGREMGEAALSNYTQTKSVRIAIDKPIR

SEQ ID NO: 447 - DNA, 1503 bp, Saccharomyces cerevisiae
  CDS (1)..(1503)
atgactaagctacactttgacactgctgaaccagtcaagatcacacttccaaatggtttgacatacgagcaaccaaccggtctattcattaacaacaagtttatgaaagctcaagacggtaagacctatcccgtcgaagatccttccactgaaaacaccgtttgtgaggtctcttctgccaccactgaagatgttgaatatgctatcgaatgtgccgaccgtgctttccacgacactgaatgggctacccaagacccaagagaaagaggccgtctactaagtaagttggctgacgaattggaaagccaaattgacttggtttcttccattgaagctttggacaatggtaaaactttggccttagcccgtggggatgttaccattgcaatcaactgtctaagagatgctgctgcctatgccgacaaagtcaacggtagaacaatcaacaccggtgacggctacatgaacttcaccaccttagagccaatcggtgtctgtggtcaaattattccatggaactttccaataatgatgttggcttggaagatcgccccagcattggccatgggtaacgtctgtatcttgaaacccgctgctgtcacacctttaaatgccctatactttgcttctttatgtaagaaggttggtattccagctggtgtcgtcaacatcgttccaggtcctggtagaactgttggtgctgctttgaccaacgacccaagaatcagaaagctggcttttaccggttctacagaagtcggtaagagtgttgctgtcgactcttctgaatctaacttgaagaaaatcactttggaactaggtggtaagtccgcccatttggtctttgacgatgctaacattaagaagactttaccaaatctagtaaacggtattttcaagaacgctggtcaaatttgttcctctggttctagaatttacgttcaagaaggtatttacgacgaactattggctgctttcaaggcttacttggaaaccgaaatcaaagttggtaatccatttgacaaggctaacttccaaggtgctatcactaaccgtcaacaattcgacacaattatgaactacatcgatatcggtaagaaagaaggcgccaagatcttaactggtggcgaaaaagttggtgacaagggttacttcatcagaccaaccgttttctacgatgttaatgaagacatgagaattgttaaggaagaaatttttggaccagttgtcactgtcgcaaagttcaagactttagaagaaggtgtcgaaatggctaacagctctgaattcggtctaggttctggtatcgaaacagaatctttgagcacaggtttgaaggtggccaagatgttgaaggccggtaccgtctggatcaacacatacaacgattttgactccagagttccattcggtggtgttaagcaatctggttacggtagagaaatgggtgaagaagtctaccatgcatacactgaagtaaaagctgtcagaattaagttgtaa

SEQ ID NO: 448 - protein, 500 aa, Saccharomyces cerevisiae
MTKLHFDTAEPVKITLPNGLTYEQPTGLFINNKFMKAQDGKTYPVEDPSTENTVCEVSSATTEDVEYAIECADRAFHDTEWATQDPRERGRLLSKLADELESQIDLVSSIEALDNGKTLALARGDVTIAINCLRDAAAYADKVNGRTINTGDGYMNFTTLEPIGVCGQIIPWNFPIMMLAWKIAPALAMGNVCILKPAAVTPLNALYFASLCKKVGIPAGVVNIVPGPGRTVGAALTNDPRIRKLAFTGSTEVGKSVAVDSSESNLKKITLELGGKSAHLVFDDANIKKTLPNLVNGIFKNAGQICSSGSRIYVQEGIYDELLAAFKAYLETEIKVGNPFDKANFQGAITNRQQFDTIMNYIDIGKKEGAKILTGGEKVGDKGYFIRPTVFYDVNEDMRIVKEEIFGPVVTVAKFKTLEEGVEMANSSEFGLGSGIETESLSTGLKVAKMLKAGTVWINTYNDFDSRVPFGGVKQSGYGREMGEEVYHAYTEVKAVRIKL

SEQ ID NO: 449 - DNA, 1837 bp, Saccharomyces cerevisiae
  CDS (199)..(1734)
gggaaagaaaaatgtggtgtaagagagaaatgaataatgtaggagtgatgttctggaaatgactctgttcttttataattaatgagtggtgtgtataaaactaccattcaaactgtcctataacaagctacgctgtagtatccaatctggaaacgtcattgtcctctgcgtcatttcaaaagcggcggttttgtaaggatgtctaagtccaagactaagaccgacaagagaaaccaatcttccttgtctagaatcaagttgtccgctttgcactactgtatgtctgacgctgaaccatccattgcctacttgcaagacaactctgctttcattaacaacgaatggcacaacttggttttggaaaagattttcccagtctacaacccatctactgaagaagacatcacccaagtttccgaaaagtctcaacacgactctactgaagaagacatcacccaagtttccgaaaagtctcaacacgacgacgacaaggctgttgttgatatctctgaaagaggtagattgttgaacatcttggctgacttgattgaaagagacagagacatcttggctgccatcgaacacttggacaacggtaagccattcgacgaagcttacttgttggacttggcctctgttttgaaggaattgagatacactgctggttgggccgacaagttgcacggtaccttgagattcgccatcactattccaactttccaagatcttagattcttgagatacactagacacgaaccagttggtgtctgtggtgaaatcattccatggaacatcccattgttgatgtacatttggaagatcggtccagctttggccgctggtaacactgttgtcttgaagccagaagaattgactccattgaccgccttgactgttgctaccttgatcaaggaagctggtttcccaccaggtgttgtcaacgttgtctctggttacggtccaactgccggtgctgcctgtttgtcccacaaggacaacgacaagttggctttcaccggttctactttggttggtaaggttgtcatgaaggctgccgctaagtccaacttgaagaaggttactttggaattgggtggtaagtctccaatgatcgtcttcatcgacgctgacttggactgggccgttgaaaacgcccacttcggtgtcttcttcaaccaaggtcaatgttgtatcgctcaatctagaattactgttcacgaatccatctacgacgaaatcgttgaaagagacttggaaaaggctaagaagcaagttttgggtaacccattcgaatctgacactagatacggtccacaaattttgaagatcgagttcgactccatcccaagattgattaactccgctaaggccgaaggtgctaaggttttgtgtggtggtggtagagacgacagctgtgttggttactacatccaaccaactgttttcgctgacgtcaccgacgaaatgagaatcgctaaggaagaaattttcggtccagttatcactatctcgaggttcaagtctgttgacgaagctattaagagagtcgacaacactaagtacggtttggctgcctacgttttcactaaggacaaggctatcagaatttctgctgccttgaaggctggtactgtttgggtcaactgtgttcacgtcgcttcttaccaaatcccattcggtggtaacaagaactctggtatgggtagagaattgggtgaatacggtttggaataagggggggttagtatgaggctatgagaacggagttagtggagaataagagcccgctttttattttagacgttacgtagtcctataaattagctttaccggtcaa

SEQ ID NO: 450 - protein, 511 aa, Saccharomyces cerevisiae
MSKSKTKTDKRNQSSLSRIKLSALHYCMSDAEPSIAYLQDNSAFINNEWHNLVLEKIFPVYNPSTEEDITQVSEKSQHDSTEEDITQVSEKSQHDDDKAVVDISERGRLLNILADLIERDRDILAAIEHLDNGKPFDEAYLLDLASVLKELRYTAGWADKLHGTLRFAITIPTFQDLRFLRYTRHEPVGVCGEIIPWNIPLLMYIWKIGPALAAGNTVVLKPEELTPLTALTVATLIKEAGFPPGVVNVVSGYGPTAGAACLSHKDNDKLAFTGSTLVGKVVMKAAAKSNLKKVTLELGGKSPMIVFIDADLDWAVENAHFGVFFNQGQCCIAQSRITVHESIYDEIVERDLEKAKKQVLGNPFESDTRYGPQILKIEFDSIPRLINSAKAEGAKVLCGGGRDDSCVGYYIQPTVFADVTDEMRIAKEEIFGPVITISRFKSVDEAIKRVDNTKYGLAAYVFTKDKAIRISAALKAGTVWVNCVHVASYQIPFGGNKNSGMGRELGEYGLE

SEQ ID NO: 451 - DNA, 1653 bp, Alternaria alternata
  CDS (59)..(1552)
ggcacgaggagaactagtctcgagttttcttcatataccccaatttgttttcacagctatgacatctgtaaagctctcaacccctcagacgggcgagttcgagcagcccaccggactcttcatcaacaatgagttcgtaaaggctgttgacggcaagacctttgatgttatcaacccctccactgaggaggtcatctgcagtgttcaggaggccaccgagaaggatgttgacattgctgttgctgccgcccgcaaagccttcaacggcccatggcgaaaggagacaccagagaacaggggaaagctgcttaacaagcttgccgatctgttcgagaagaatgccgacctcattgctgctgtcgaggctctcgacaacggcaaggccttcagcatggccaagaacgtcgatgttcccgccgccgctggttgcctgaggtactacggaggatgggccgacaagattgagggcaaggtcgtcgacacagcacccgacagcttcaactacatccgcaaggagcctattggtgtttgcggtcagatcatcccatggaacttccctattctcatgtggtcatggaagattggtcctgccatcgccactggtaacaccgtcgtcctgaagactgctgagcagacacctctctccgcatacattgcctgcaagctgatccaggaggccggtttcccaccaggtgtcatcaacgtcatcactggtttcggaaagatcgccggtgctgccatgtccgctcacatggacattgacaagattgcctttactggttcaaccgttgtcggccgtcaaatcatgaagtctgccgctggctccaacttgaagaaggtcactcttgagctcggaggcaagagccccaacattgtcttcgccgacgcagatcttgacgaggctatccactgggtcaactttggtatttacttcaaccacggacaggcttgttgtgctggttcgcgtatctacgtccaagaagagatctacgacaagttcatccagcgcttcaaggagcgggctgctcagaacgctgttggtgacccattcgccgcggacaccttccagggtcctcaagtctcgcagctccagttcgaccgtatcatgggctacatcgaggagggcaagaagtctggcgcgaccatcgagactggtggcaaccgtaagggtgacaagggttacttcatcgagcccacaatcttctccaacgtaaccgaggacatgaagattcagcaagaagagatcttcggccccgtctgcacaatctccaagttcaagacaaaggccgacgtcatcaagattggcaacaacaccacatacggtcttgctgccgctgtacacacatccaacctcaccactgccatcgaagttgccaacgcgctccgtgcaggaactgtctgggtcaactcctacaacactcttcactggcagcttcccttcggagggtacaaggagtctggtattgggcgcgagttgggagaggcggcgctggacaactacatccagaccaagaccgtgtctattcgtcttggcgatgttctgttcggttaagcgctatgctggttttttagcgaaggatctcataagtactatgtatagctcaagtagtcatgaggatctaaatgaatgtaaagaattatcaacaaaaaaaa

SEQ ID NO: 452 - protein, 497 aa, Alternaria alternata
MTSVKLSTPQTGEFEQPTGLFINNEFVKAVDGKTFDVINPSTEEVICSVQEATEKDVDIAVAAARKAFNGPWRKETPENRGKLLNKLADLFEKNADLIAAVEALDNGKAFSMAKNVDVPAAAGCLRYYGGWADKIEGKVVDTAPDSFNYIRKEPIGVCGQIIPWNFPILMWSWKIGPAIATGNTVVLKTAEQTPLSAYIACKLIQEAGFPPGVINVITGFGKIAGAAMSAHMDIDKIAFTGSTVVGRQIMKSAAGSNLKKVTLELGGKSPNIVFADADLDEAIHWVNFGIYFNHGQACCAGSRIYVQEEIYDKFIQRFKERAAQNAVGDPFAADTFQGPQVSQLQFDRIMGYIEEGKKSGATIETGGNRKGDKGYFIEPTIFSNVTEDMKIQQEEIFGPVCTISKFKTKADVIKIGNNTTYGLAAAVHTSNLTTAIEVANALRAGTVWVNSYNTLHWQLPFGGYKESGIGRELGEAALDNYIQTKTVSIRLGDVLFG

SEQ ID NO: 453 - DNA, 1660 bp, Cladosporium herbarum
  CDS (70)..(1560)
cacgaggttgaggttgtgccattgccttcctgtttgatacccccaacaaacgagacacatcacttcaatatgacttccgtccagcttgagacgccgcactccggcaagtacgagcagccgaccggcctcttcatcaacaacgagttcgtcaagggccaagaaggcaagaccttcgatgtcatcaacccctccgacgagagcgtgatcacccaggtccacgaggccaccgagaaggatgtcgacatcgccgtcgccgccgcccgcaaggccttcgagggctcatggagacaggagacacccgagaaccgtggcaagctgctcaacaacctcgccaacctgttcgagaagaacatcgacctccttgctgccgttgagtcgctcgacaacggcaaggccatctccatggccaagggtgacatcagcatgtgcgtcggctgcctcagatactacggtggttgggcggacaagatcaccggcaaggtcatcgacactacgcccgacactttcaactacgtcaagaaggagcccattggtgtttgcggtcagatcattccctggaacttcccccttctcatgtgggcatggaagatcggcccggccattgcttgcggtaacactgtcgtcctgaagactgctgagcagacccctcttggtggtctcgtcgctgccagcctcgtcaaggaggccggtttccctcctggtgtcatcaacgtcatttccggtttcggcaaggtcgctggtgccgctctctcttctcacatggacgtcgacaaggtggccttcaccggttccaccgttgtcggccgcacaatcctcaaggctgctgcctcttccaacttgaagaaggtcaccctcgagctcggtggcaagtcaccaaacattgtcttcgaggacgccgatattgacaacgccatctcatgggtcaacttcggtatcttcttcaaccacggccagtgctgctgtgctggttcgcgtgtgtacgttcaggagagcatctacgacaagttcgtccagaagttcaaggagcgcgcacagaagaacgttgttggcgaccccttcgccgccgacacattccagggtcctcaggtttccaaggttcagttcgaccgcattatggagtacatccaggccggcaaggacgccggtgccaccgtcgagaccggtggcaagcgtaagggtgacaagggctacttcattgagcccaccatcttctccaacgtcacagaggacatgaagatcgtgaaagaggagatcttcggccccgtctgctcgatcgccaagttcaagaccaaggaggacgccatcaagctcggcaacgccagcacatacggtctcgccgccgccgtccacaccaagaacctcaacaccgccatcgaggtctccaacgctctcaaggcgggcaccgtctgggtcaacacttacaacaccctccaccaccagatgccgttcggtggctacaaggagtccggtattggccgtgagctcggcgaggatgcgttggccaactacactcagaccaagactgttagcattcgtctcggtgacgccctcttcggttaggcgtgttgaggagagatggattaatgggttgttgaagcggttgaagatcgtttcggtgtaattacgtatgacgttatgaaatgaataacaatgtgtactg

SEQ ID NO: 454 - protein, 496 aa, Cladosporium herbarum
MTSVQLETPHSGKYEQPTGLFINNEFVKGQEGKTFDVINPSDESVITQVHEATEKDVDIAVAAARKAFEGSWRQETPENRGKLLNNLANLFEKNIDLLAAVESLDNGKAISMAKGDISMCVGCLRYYGGWADKITGKVIDTTPDTFNYVKKEPIGVCGQIIPWNFPLLMWAWKIGPAIACGNTVVLKTAEQTPLGGLVAASLVKEAGFPPGVINVISGFGKVAGAALSSHMDVDKVAFTGSTVVGRTILKAAASSNLKKVTLELGGKSPNIVFEDADIDNAISWVNFGIFFNHGQCCCAGSRVYVQESIYDKFVQKFKERAQKNVVGDPFAADTFQGPQVSKVQFDRIMEYIQAGKDAGATVETGGKRKGDKGYFIEPTIFSNVTEDMKIVKEEIFGPVCSIAKFKTKEDAIKLGNASTYGLAAAVHTKNLNTAIEVSNALKAGTVWVNTYNTLHHQMPFGGYKESGIGRELGEDALANYTQTKTVSIRLGDALFG

SEQ ID NO: 455 - DNA, 1494 bp, Emericella nidulans
  CDS (1)..(1494)
atgtctgatttgttcaccaccatcgagactccggtcatcaaatatgagcagcctctcggcctgttcatcaacaacgagttcgtgaagggcgttgagggcaagaccttccaggtcatcaacccctccaacgagaaggtcatcacctccgtccacgaagccaccgagaaggatgttgatgtcgccgtcgctgctgcccgtgctgcctttgaggggccatggcgccaggtcaccccctctgagcgtggcattttgatcaacaagctggcggatctgatggagcgtgatatcgacaccctcgccgctatcgagtctctcgacaacggcaaggctttcaccatggccaaggtcgatcttgccaactccattggttgcttgcgatactacgctggctgggcggacaagattcacggtcagaccattgacaccaaccccgagactcttacctacacccgccacgagcccgttggtgtttgcggtcagatcatcccctggaacttcccccttctgatgtggtcctggaagattggacccgctgttgccgctggtaacactgttgtcctcaagaccgccgagcagacccctctctccgccctttacgctgctaagctgatcaaggaggctggattccccgctggtgtgatcaacgtcatctctggctttggccgtaccgctggtgctgccatctccagccacatggacattgacaaggttgccttcactggctctactcttgttggacgtaccatcctgcaggccgctgctaagagcaacctgaagaaggtcactcttgagctcggtggcaagtctcccaacatcgtctttgatgatgctgacattgacaacgccatttcctgggccaactttggtatcttcttcaaccacggccagtgctgctgtgctggatcccgtatcctggtccaggagggcatctacgacaagttcgtcgcccgcttcaaggagcgtgcccagaagaacaaggtcggaaaccccttcgagcaggacaccttccagggtccccaggtttcccagctccagttcgaccgtatcatggagtacatcaaccacggcaagaaggctggtgctaccgtcgccaccggtggtgaccgccacggcaacgagggttacttcatccagcctactgtcttcacagacgtcacttccgacatgaagattgcccaggaggagatcttcggtcctgtcgtcactatccagaagttcaaggatgaggctgaggctatcaagatcggcaactcgaccgactacggtcttgctgctgccgtgcacacaaagaacgtcaacaccgccattcgcgtgtccaacgctctgaaggctggtaccgtctggatcaacaactacaacatgatctcgtaccaggctcccttcggtggcttcaagcagtccggtctcggccgtgagcttggctcttacgctcttgagaactacacacagatcaagacggtgcactaccgcctgggtgatgctcttttcgcttaa

SEQ ID NO: 456 - protein, 497 aa, Emericella nidulans
MSDLFTTIETPVIKYEQPLGLFINNEFVKGVEGKTFQVINPSNEKVITSVHEATEKDVDVAVAAARAAFEGPWRQVTPSERGILINKLADLMERDIDTLAAIESLDNGKAFTMAKVDLANSIGCLRYYAGWADKIHGQTIDTNPETLTYTRHEPVGVCGQIIPWNFPLLMWSWKIGPAVAAGNTVVLKTAEQTPLSALYAAKLIKEAGFPAGVINVISGFGRTAGAAISSHMDIDKVAFTGSTLVGRTILQAAAKSNLKKVTLELGGKSPNIVFDDADIDNAISWANFGIFFNHGQCCCAGSRILVQEGIYDKFVARFKERAQKNKVGNPFEQDTFQGPQVSQLQFDRIMEYINHGKKAGATVATGGDRHGNEGYFIQPTVFTDVTSDMKIAQEEIFGPVVTIQKFKDEAEAIKIGNSTDYGLAAAVHTKNVNTAIRVSNALKAGTVWINNYNMISYQAPFGGFKQSGLGRELGSYALENYTQIKTVHYRLGDALFA

SEQ ID NO: 457 - DNA, 1524 bp, Streptomyces coelicolor
  CDS (1)..(1524): transl_table=11
atgacccgttacgcggcgcccggcaccgagggcgcgatcgtctcctatcagtcgcgctacgaccacttcatcggcggcgagtacgtgccaccggcgcgcgggcagtacttcgagaacccgtccccggtgaacggcctgccgttcaccgagatcgcgcgcggcacggccgacgacgtggaacgggcgctcgacgccgcgcacgaggccgctccgggctggggccgtacctcggtgaccgagcgttccgacatcctcctgaagatcgccgaccgcatggaggcgaacctggagcgcctggcggtcgcggagagctgggagaacggcaagccggtgcgcgagactctggcggccgacatccccctcgccatcgaccacttccgctacttcgcgggcgcggtgcgcgcccaggagggctcactcggcgagatcgacgacgacaccgtggcgtaccacttccacgaaccgctgggggtcgtcgcccagatcatcccgtggaacttcccgatcctgatggccacctggaagctcgcgcccgccctcgccgccggcaacgccgtggtcctgaagcccgcggagcagaccccggcctcgatccactactggctgagcctggtggcggacctgctgccgcccggggtcctgaacgtcgtcaacggcttcggggtggaggcgggcaaaccgctcgcgtcgagcccccgggtggcgaaggtggcgttcaccggcgagaccaccaccgggcggctgatcatgcagtacgcctcggagaacatcaaaccggtcacgctggagctgggcggcaagtcgccgaacatcttcttcgaggacgtctgggcgcgggacgacgacttccgcgacaaggcgctcgagggcttcaccatgttcgcgctcaaccagggggaggtctgcacctgtccgtcccgcgcgctcgtccagcggggcgtctacgccgagttcatggaggcagccgtcgcgcgcaccgagttgatcaagcccggtcaccccctggacaccgacacgatgatcggcgcccaggcctccaacgaccagttggagaagatcctctcctacctggacatcggccgccaggagggcgcgaaggtactcaccggtggtgagcggatcgagcacgacggcgagttgaagggcggctactacgtccagccgacgatcttcgagggccacaaccgcatgcggatcttccaggaggagatcttcggcccggtggtgtcggtgacgtccttcgacgacttcgacgacgccgtcaagaccgccaacgacaccctgtacggcctcggcgccggggtgtggacccgcgacatgaacaccgcgtaccgcgcgggccgcgcgatccaggcgggacgcgtgtggacgaactgctaccacgcatacccggcgcacgccgccttcggcggctacaagcagtcgggcatcggccgggagaaccacaagatgatgctggagcactaccagcagacgaagaacattctttgttcctacagccccaagaaactcgggttcttctag

SEQ ID NO: 458 - protein, 507 aa, Streptomyces coelicolor
MTRYAAPGTEGAIVSYQSRYDHFIGGEYVPPARGQYFENPSPVNGLPFTEIARGTADDVERALDAAHEAAPGWGRTSVTERSDILLKIADRMEANLERLAVAESWENGKPVRETLAADIPLAIDHFRYFAGAVRAQEGSLGEIDDDTVAYHFHEPLGVVAQIIPWNFPILMATWKLAPALAAGNAVVLKPAEQTPASIHYWLSLVADLLPPGVLNVVNGFGVEAGKPLASSPRVAKVAFTGETTTGRLIMQYASENIKPVTLELGGKSPNIFFEDVWARDDDFRDKALEGFTMFALNQGEVCTCPSRALVQRGVYAEFMEAAVARTELIKPGHPLDTDTMIGAQASNDQLEKILSYLDIGRQEGAKVLTGGERIEHDGELKGGYYVQPTIFEGHNRMRIFQEEIFGPVVSVTSFDDFDDAVKTANDTLYGLGAGVWTRDMNTAYRAGRAIQAGRVWTNCYHAYPAHAAFGGYKQSGIGRENHKMMLEHYQQTKNILCSYSPKKLGFF

SEQ ID NO: 459 - DNA, 1506 bp, Arabidopsis thaliana
  CDS (1)..(1506)
atggcgattccgatgcctactcgccagctattcatcgacggcgaatggagagaacccatcttgaagaagcgaatcccgatcgttaatccagctactgaagaggtcattggtgatattcctgcagctacaacggaggacgtggatgttgctgtcaacgctgctcgaagagcattatcaaggaataaagggaaagattgggccaaagcacctggagctgttcgtgctaagtatttacgtgctattgctgctaaggtaaatgaaagaaagacggatctggcaaagctcgaggcgcttgattgtggtaaaccattggatgaagcagtatgggatatggatgatgttgctggatgttttgaattttatgctgaccttgctgaagggttagatgctaagcagaaagcaccagtctcgcttcccatggagagttttaagagttatgttctgaagcaacctctcggagttgtgggacttattacaccatggaattacccccttttgatggctgtttggaaggtggctccttcccttgctgcagggtgcactgcgattctcaagccatcagagctggcatcagttacttgtttggagcttgctgatatttgtcgagaagttggtcttcctcctggggtcctcaatgttttgactggtttcggttcggaagctggtgctcctttggcatcacatcctggcgtggacaagattgcatttactggaagtttcgccacaggaagtaaggtcatgacagccgctgctcagttggtgaagcctgtttctatggaacttggtgggaagagcccactcattgtgtttgatgacgttgatcttgataaagctgctgaatgggctcttttcggttgcttctggacaaatggtcaaatctgcagtgcaacttcccgccttcttgttcacgaaagcatcgcatctgagttcatagagaagcttgtaaaatggagcaagaacattaaaatttcagaccccatggaagaaggatgcaggcttggtcctgtagttagcaaaggacagtacgagaagatattgaagtttatctcaacggccaagagtgaaggagcaacgatcttgcatggtggttcccgacctgagcatctggaaaagggcttcttcattgaaccaaccatcataactgatgtaaccacttcaatgcaaatatggagagaagaagttttcgggcctgttctttgcgtgaaaacatttgccagtgaggacgaggcaattgagctagcaaatgactctcattacggactaggagctgcagtgatatctaatgacacagaaagatgtgaccgtataagcgaggcctttgaagctgggattgtctggattaactgctcgcagccttgctttacccaagccccatggggtggtgtcaaacgcagtgggtttggacgagaacttggagaatggggacttgataactacttgagtgtgaagcaagtgactctctacacttcaaacgatccctggggatggtacaaatctcccaactaa

SEQ ID NO: 460 - protein, 501 aa, Arabidopsis thaliana
MAIPMPTRQLFIDGEWREPILKKRIPIVNPATEEVIGDIPAATTEDVDVAVNAARRALSRNKGKDWAKAPGAVRAKYLRAIAAKVNERKTDLAKLEALDCGKPLDEAVWDMDDVAGCFEFYADLAEGLDAKQKAPVSLPMESFKSYVLKQPLGVVGLITPWNYPLLMAVWKVAPSLAAGCTAILKPSELASVTCLELADICREVGLPPGVLNVLTGFGSEAGAPLASHPGVDKIAFTGSFATGSKVMTAAAQLVKPVSMELGGKSPLIVFDDVDLDKAAEWALFGCFWTNGQICSATSRLLVHESIASEFIEKLVKWSKNIKISDPMEEGCRLGPVVSKGQYEKILKFISTAKSEGATILHGGSRPEHLEKGFFIEPTIITDVTTSMQIWREEVFGPVLCVKTFASEDEAIELANDSHYGLGAAVISNDTERCDRISEAFEAGIVWINCSQPCFTQAPWGGVKRSGFGRELGEWGLDNYLSVKQVTLYTSNDPWGWYKSPN

SEQ ID NO: 461 - DNA, 1543 bp, Arabidopsis thaliana
  CDS (1)..(1512)
atggcgattacggtgccgagacggcaactcttcatcggcggtcaatggactgagcccgttctccgtaaaactctccctgttgtcaatcccgccaccgaagacatcatcggttatattccagctgcaacttctgaagatgtggagcttgctgtggaagctgctaggaaagcatttactaggaacaacggaaaggattgggctagagcaactggtgctgttcgtgccaaatacttgcgcgctattgcagctaaggtaatagagaggaagtctgaactagctaatcttgaggctattgattgcggtaaacctctagatgaagcagcatgggacatggatgatgttgctggatgttttgaatattatgctgacctagctgaaggcttggatgcaaagcagaagactcctctttctcttccgatggatacttttaagggttatattctcaaggaacccattggcgtagttggcatgattactccatggaactatccgttattgatggctgtctggaaagtcgctccttcacttgctgctgggtgcacggctatactgaaaccttcagagttggcctccctgacatgtttggagctcgctgatatttgccgcgaggtgggtctaccacctggtgttcttaatattctgactggtttaggaactgaagcaggtgctccactggcatcgcatccacatgttgacaagattgtattcactggaagcacaacaactggaagcagcattatgacttccgctgccaaattggtgaaaccagtttccttggagcttgggggtaaaagccctatcattgtctttgatgatgtcgatattgataaagctgtggaatggactatgtttggttgtttctggacgaatgggcagatttgtagtgccacatctcgacttcttgtgcatgaaaggattgctgacgagtttttggacaagctggtaaagtggaccaagaacattaagatttcagatccttttgaagaaggctgtaggcttggtcctgttgtcagtaaaggacagtacgagagagttctaaagtttgtctcaaacgctaggaatgaaggtgcaactgttctttgtggaggagttcgtcctgagcatttaaagaagggatactttgttgaacctgcgattgtttcaaatgtgactacttcaatggaaatctggagagaggaagtctttggtcctgctctgtgtgtgaaaacattctccaccgaggatgaggcaattcagcttgcaaatgactctcaatatggattagcaggcgcagtattatcaaatgatctggagcggtgtgatcgtgttagtaaggctttccaggcgggaatagtgtgggtcaactgctctcagccatgcttctgccaagctccatggggtggaaccaaacgcagtggatttggccgtgaattgggagaatggggacttgagaactacttgagtgtgaagcaggtgactcagtatatctctgatgaaccatggggatggtacaaacctccttccaagctctgagacaaacactagttcctgatatttccttaaa

SEQ ID NO: 462 - protein, 503 aa, Arabidopsis thaliana
MAITVPRRQLFIGGQWTEPVLRKTLPVVNPATEDIIGYIPAATSEDVELAVEAARKAFTRNNGKDWARATGAVRAKYLRAIAAKVIERKSELANLEAIDCGKPLDEAAWDMDDVAGCFEYYADLAEGLDAKQKTPLSLPMDTFKGYILKEPIGVVGMITPWNYPLLMAVWKVAPSLAAGCTAILKPSELASLTCLELADICREVGLPPGVLNILTGLGTEAGAPLASHPHVDKIVFTGSTTTGSSIMTSAAKLVKPVSLELGGKSPIIVFDDVDIDKAVEWTMFGCFWTNGQICSATSRLLVHERIADEFLDKLVKWTKNIKISDPFEEGCRLGPVVSKGQYERVLKFVSNARNEGATVLCGGVRPEHLKKGYFVEPAIVSNVTTSMEIWREEVFGPALCVKTFSTEDEAIQLANDSQYGLAGAVLSNDLERCDRVSKAFQAGIVWVNCSQPCFCQAPWGGTKRSGFGRELGEWGLENYLSVKQVTQYISDEPWGWYKPPSKL

SEQ ID NO: 463 - DNA, 1513 bp, Atriplex hortensis
  CDS (4)..(1512)
agaatggcgttcccaattcctgctcgtcaactcttcatcgatggagagtggagagaaccccttttaaaaaatcgcatacccatcatcaacccttctactgaagaaatcatcggtgatattcctgcagcaactgcagaggatgtggaggttgcagtggtggcagctagaaaagcctttaagaggaacaaaggcagagattgggctgcactctggtctcatcgtgctaaatatttgcgtgctattgctgctaagataacagagaaaaaagatcattttgttaaactggaaacccttgattctggaaaaccacgggatgaagcagtgttagatattgatgatgttgctacatgctttgaatactttgaatactttgccggtcaagcagaagctctggatgctaaacaaaaggctccagtcaccctgcctatggaaagatttaaaagtcatgttctcaggcagcccattggtgttgttggattaatatccccatggaattacccacttctaatggatacatggaaaattgctcccgcacttgctgctggatgcacgactgtacttaaaccatcagaattggcatctgtgacttgtctagaattcggtgaagtgtgtaatgaagtgggacttcctccaggtgtgttaaatattttgacaggattaggtcctgatgctggtgccccaatagtatctcatcctgatattgacaaggtagcatttactgggagtagtgccactggaagcaagattatggcttctgctgcccaactagttaagcctgttactttggagcttggaggtaaaagtcctgttatcatgttcgaagatattgatattgaaacagctgttgaatggactctttttggcgttttctggacaaatggtcaaatctgtagtgcaacatctagactgcttgtgcatgaaagcattgcagctgaatttgttgataggatggtgaagtggacaaaaaacataaaaatttctgatccatttgaagaaggatgccggcttggccccgttattagtaaaggacagtacgacaagattatgaagttcatatcaacagcgaagagtgaaggggcaacaattttgtgtggaggctcccgtcctgagcatttgaagaaagggtattatattgaacccaccattataactgatattaccacatccatgcaaatatggaaagaggaagtgtttggccctgtcatatgtgttaaaacatttaaaactgaagatgaagccattgaattggcaaatgatacagagtatggtttagctggtgccgtgttttctaaagatcttgaaagatgtgagagggtaactaaggctctagaagttggagctgtttgggttaattgctcacaaccatgctttgttcatgctccatggggaggagtcaagcgtagtggatttggacgtgaacttggggaatggggtatcgagaattacttgaatatcaagcaggtgacgagtgatatctctgatgaaccatggggatggtacaagtctccttgaa

SEQ ID NO: 464 - protein, 502 aa, Atriplex hortensis
MAFPIPARQLFIDGEWREPLLKNRIPIINPSTEEIIGDIPAATAEDVEVAVVAARKAFKRNKGRDWAALWSHRAKYLRAIAAKITEKKDHFVKLETLDSGKPRDEAVLDIDDVATCFEYFEYFAGQAEALDAKQKAPVTLPMERFKSHVLRQPIGVVGLISPWNYPLLMDTWKIAPALAAGCTTVLKPSELASVTCLEFGEVCNEVGLPPGVLNILTGLGPDAGAPIVSHPDIDKVAFTGSSATGSKIMASAAQLVKPVTLELGGKSPVIMFEDIDIETAVEWTLFGVFWTNGQICSATSRLLVHESIAAEFVDRMVKWTKNIKISDPFEEGCRLGPVISKGQYDKIMKFISTAKSEGATILCGGSRPEHLKKGYYIEPTIITDITTSMQIWKEEVFGPVICVKTFKTEDEAIELANDTEYGLAGAVFSKDLERCERVTKALEVGAVWVNCSQPCFVHAPWGGVKRSGFGRELGEWGIENYLNIKQVTSDISDEPWGWYKSP

SEQ ID NO: 465 - DNA, 1789 bp, Beta vulgaris
  CDS (36)..(1538)
attttactgaatttcttctactgttttttaaaaaaatgtcgatgccaattccttctcgccagttattcattgatggagagtggagagaacccatcaagaaaaatcgcatccctattatcaacccatctaatgaggagatcatcggtgatattccggcgggcagttccgaggatatagaggttgcggtggcggccgctcgaagagcccttaagaggaataagggaagagagtgggctgctacatctggagctcatcgtgccagatatttgcgtgctattgctgctaaagtgacagaaagaaaagatcattttgttaaacttgaaacgattgattctgggaagccatttgatgaagcagtgttggatattgatgatgtggccacatgttttgaatattttgccggtcaagcagaagccatggacgctaaacaaaaagctcccgtcacccttccaatggagagattcaaaagtcatgttctcaggcagcccattggtgttgttggattgattaccccatggaattacccacttctaatggctacatggaaaattgctccagctcttgctgctgggtgtacggctgtactgaagccatcagagttggcatctataacttgcctagaatttggagaagtttgcaatgaagtgggacttcctccgggggtgttgaatattgtgactggattgggtccagatgccggtgcaccgctagcagctcatcctgatgtcgacaaggttgcatttactggaagtagtgccactggcagcaaagtgatggcttcagctgctcaattagttaagcctgttacattggaacttggaggtaaaagtcctattatcgtgttcgaagatgttgatattgatcaagttgttgaatggaccatgtttggctgtttctggacaaatggtcaaatatgcagtgcaacatccagactccttgtgcatgaaagtattgcagctgaatttattgataggcttgtaaagtggaccaaaaacattaagatatctgatccatttgaggaaggctgtcgacttggccctgttattagtaaggggcagtacgataaaattatgaagttcatatcaacagcaaagagtgagggggcaactatcttgtgtggaggttcccgtcctgagcatttgaagaaagggtatttcatcgaaccaactattataagtgatatctccacatccatgcaaatatggagggaagaagtttttggccctgtcttatgtgttaaaacatttagttctgaagatgaagctcttgaattggcaaatgatacagagtatggtttagcttctgctgtgttttcaaaagaccttgaaaggtgtgaaagggtatcgaagcttttggaatctggagccgtgtgggttaattgctcacaaccatgctttgttcatgctccatggggaggcatcaagcgtagtggttttggacgtgagcttggggaatggggtatcgagaattacttgaacatcaagcaggtcacgtcggatatttctaacgaaccatggggatggtacaagtctccttaaagctactctcctataagaaactttgcacgaatgctgccgttgtaaagtgaacagtggataacttaaggatccagtttagttcttgaatatatgtgattgaataaaggtggtttgatgttggagtaggattagcaaaataattcagacaattgagtttgaccatgaaatccttgtttttcttctagattcatggcatattaaacttgtttgctacttttatttgctggaaaaaaaaaaaaaaaaaaaaaaaa

SEQ ID NO: 466 - protein, 500 aa, Beta vulgaris
MSMPIPSRQLFIDGEWREPIKKNRIPIINPSNEEIIGDIPAGSSEDIEVAVAAARRALKRNKGREWAATSGAHRARYLRAIAAKVTERKDHFVKLETIDSGKPFDEAVLDIDDVATCFEYFAGQAEAMDAKQKAPVTLPMERFKSHVLRQPIGVVGLITPWNYPLLMATWKIAPALAAGCTAVLKPSELASITCLEFGEVCNEVGLPPGVLNIVTGLGPDAGAPLAAHPDVDKVAFTGSSATGSKVMASAAQLVKPVTLELGGKSPIIVFEDVDIDQVVEWTMFGCFWTNGQICSATSRLLVHESIAAEFIDRLVKWTKNIKISDPFEEGCRLGPVISKGQYDKIMKFISTAKSEGATILCGGSRPEHLKKGYFIEPTIISDISTSMQIWREEVFGPVLCVKTFSSEDEALELANDTEYGLASAVFSKDLERCERVSKLLESGAVWVNCSQPCFVHAPWGGIKRSGFGRELGEWGIENYLNIKQVTSDISNEPWGWYKSP

SEQ ID NO: 467 - DNA, 1826 bp, Hordeum vulgare
  CDS (48)..(1565)
caccaccgtcaccacccaggcgcccacctcgccggagcagagtagccatggccgcgcccccagcgatcccgcgccgcggcctcttcatcggcggcgggtggcgcgagcccaccctgggccgccacatccccgtcatcaacccggccaccgaggacaccatcggcgacatcccggcagccaccgcggaggacgtcgagctcgccgtcgcggccggcggtccggttcttgctcgacggcgggagccctgggcgcgcgcttccggggccacgcgtgccaagtatctgaacgcgatcgccgctaagattacaggaaagatagcgtatctggcattgctggagacggttgattctggaaaacccaaggatgaagcagttgctgacatggacgatgttgctgcatgctttgagtactatgctgctctggctgaagccttagatgggaaacaacatgcaccaatctctctgcccatggaagaattcaagacctatgttcttaaagaacccatcggggttgttggactcatcactccctggaactatcctttgttgatggctacttggaaggttgcacctgccctggctgctgggtgtacagctgtgttaaaaccatctgagctggcatctctaacttgcttagagctcggcgcaatatgtgaagagataggactgccttcaggagttctgaacataattactggtctgggccctgacgcaggtgctccaatagcttcacatccccatgtggataagatcgcttttacaggaagtactgcaactggtaagacgataatgaccgctgctgctcaaatggttaagcctgtttcattagagcttggtggcaaaagtcctcttgttacctttgatgatgttgctgacattgacaaagctgttgaatggcccatgttgggttgttttttcaatggtggtcaagtttgcagtgcaacttctcgcctacttctccatgaaaaaattgcagagccatttttggatagacttgtcgaatgggcaaagaatattaaaatctcagacccactagaagaaggttgcaggctgggttcagtcatcagtaaagggcagtatgaacagatcaagaagttcatctcaacagcaagaagtgaaggtgctacaattttgcatgggggtgaccgaccaaagcatctcggaaaagggttcttcattgaacccactattaatacaggcgttagcacatcaatgcaaatttggagagaggaagtctttggaccagtcatctgtgtgaaagtattcaagacagagagcgaagccgtcgagcttgcaaatgatacgcactatggcttggctggtggtgtgatctctgatgatctagagaggtgtgagcgtatcgcaaaggttattcactctggaattgtttggaaaaactgctcgcaaccgactctggttcaagctccgtggggagggaacaagcggagtggtttcggccgggagctaggagaatggggcctcgagaactacctgagcgtgaaacaagtcaccaggtactgcaaagatgagctatacggttggtaccagcgcccatccaagctgtagatgacttgagagttgagacgaggcgtccatgtcatgagaatggagcctcgttcactggaggacgggatgaatcctgatcttgtgcacggggggagacttctgtacagcggtttcgcaataatgccattgtatgtatggcaaacttggttatggacttatggtagcgcgtgtcgtcgagcctgtgacagatgtggttgatcagaactcacaaacttgctagagtaaaaacgacattacgttctgctgctttcgttgtatggc

SEQ ID NO: 468 - protein, 505 aa, Hordeum vulgare
MAAPPAIPRRGLFIGGGWREPTLGRHIPVINPATEDTIGDIPAATAEDVELAVAAGGPVLARRREPWARASGATRAKYLNAIAAKITGKIAYLALLETVDSGKPKDEAVADMDDVAACFEYYAALAEALDGKQHAPISLPMEEFKTYVLKEPIGVVGLITPWNYPLLMATWKVAPALAAGCTAVLKPSELASLTCLELGAICEEIGLPSGVLNIITGLGPDAGAPIASHPHVDKIAFTGSTATGKTIMTAAAQMVKPVSLELGGKSPLVTFDDVADIDKAVEWPMLGCFFNGGQVCSATSRLLLHEKIAEPFLDRLVEWAKNIKISDPLEEGCRLGSVISKGQYEQIKKFISTARSEGATILHGGDRPKHLGKGFFIEPTINTGVSTSMQIWREEVFGPVICVKVFKTESEAVELANDTHYGLAGGVISDDLERCERIAKVIHSGIVWKNCSQPTLVQAPWGGNKRSGFGRELGEWGLENYLSVKQVTRYCKDELYGWYQRPSKL

SEQ ID NO: 469 - DNA, 1907 bp, Oryza sativa
  CDS (113)..(1630)
ggtgagagagagtgctcgtcgtcgatcgcccaaggtccgggacaacccaaaaggccgcggcgacagcggagcagcagcagcagcagctcgcgccgccccccaaccggaagccatggccgcgccgtcggcgatcccccgccgcggcctgttcatcggcggcgggtggcgggagccgtccctcggccgccgcctccccgtcgtcaacccggccacggaggcaaccatcggtgacatcccggcggccacggcggaggacgtcgagctcgcggtgtcggcggcgagggatgcgttcggccgcgacggtgggagacactggtcgcgcgcgcctggggccgtgcgggccaagtacctcaaggcgatcgccgctaagattaaagataagaaatcttatctagctttgttggagactcttgattctgggaagcctctggatgaagcagctggggacatggaggatgtcgctgcatgctttgagtattatgctgatctggcagaagctttagatgggaaacaacgggcaccaatctctctacccatggaaaattttgagtcctatgtactcaaagaacccattggggttgttggacttatcactccctggaattatcctctgctgatggctacttggaaggttgcacctgccctggctgctgggtgtacagctgtattaaagccatctgagcttgcttccctgacatgtttagagcttggtggaatatgtgcagaaattggattacctccaggagtcttgaacataattactggtctgggcactgaagctggtgctccattagcttcacatccccatgtggataagattgcttttactggaagcacagaaactggtaagaggataatgattactgcttcccaaatggtcaagcctgtttcgttagagcttggtggcaaaagtcctcttattgtctttgatgatgttgatattgataaagctgttgagtgggccatgtttgggtgttttgcgaacgctggtcaagtctgcagtgctacttctcgtctacttttgcatgagaaaattgcaaagcgattcttggataggttggttgcatgggcaaagagtatcaaaatctcagatccactagaagaaggttgcaggctggggtcagtcgttagtgaagggcagtatcaaaaaataatgaagttcatctcaacagcaagatgtgaaggtgccacaattctatatgggggtgcccgaccacaacacctcaaaagggggttctttattgagcctactattataacaaatgttagcacatcaatgcaaatttggcgagaggaagtctttggaccggtcatctgcgttaaagaatttaggacagagcgtgaagcagtagaacttgcaaatgatactcactatggtctagctggcgctgtgatttccaatgatctagagaggtgcgagcgcatttcaaaggctatccagtcaggtatcgtttggataaattgctcgcaaccatgctttgttcaagctccatggggagggaacaagcggagtggttttggccgggagctaggacagtggggcctcgataactacttgagcgtgaagcaagtcaccaagtactgctcagatgaaccatacggatggtaccggcctccatccaagctgtagatttgtcattcgtgtcaagagcgacggagcacgtcattacctgaaagcaagatcaaccctgtacattcagaacggacggacagaatcttctttacagttgctcttacggtcttacaataagccttgcatggcaatagcaacttatgaattacagtatatgatactgcgtcatcaagcaagccatgtgtgtgctgtatcagactatcattcgctttgtcgagcacctgcatttgtcaccactcaccactgttaaagcaagaatgcaaaatgcaaaatg

SEQ ID NO: 470 - protein, 505 aa, Oryza sativa
MAAPSAIPRRGLFIGGGWREPSLGRRLPVVNPATEATIGDIPAATAEDVELAVSAARDAFGRDGGRHWSRAPGAVRAKYLKAIAAKIKDKKSYLALLETLDSGKPLDEAAGDMEDVAACFEYYADLAEALDGKQRAPISLPMENFESYVLKEPIGVVGLITPWNYPLLMATWKVAPALAAGCTAVLKPSELASLTCLELGGICAEIGLPPGVLNIITGLGTEAGAPLASHPHVDKIAFTGSTETGKRIMITASQMVKPVSLELGGKSPLIVFDDVDIDKAVEWAMFGCFANAGQVCSATSRLLLHEKIAKRFLDRLVAWAKSIKISDPLEEGCRLGSVVSEGQYQKIMKFISTARCEGATILYGGARPQHLKRGFFIEPTIITNVSTSMQIWREEVFGPVICVKEFRTEREAVELANDTHYGLAGAVISNDLERCERISKAIQSGIVWINCSQPCFVQAPWGGNKRSGFGRELGQWGLDNYLSVKQVTKYCSDEPYGWYRPPSKL

SEQ ID NO: 471 - DNA, 1503 bp, Schizosaccharomyces pombe
  CDS (1)..(1503)
atgactatagatttaaatgttatacaaagtgacattatctcagcgcgtcgagctcctgaaaatagtctgtttatagatgggaaattcgtttctcctatcgagccagctgcgaagcccatccctttaatcaatccagcaactgaggagattattggcacttgtgcaaatgcttctgccaaagatgtcgattcagctgtggagaatgcttacaacacttttcgttctggaatatgggccaaatggcctggcaaacaacgtgggttggttttgagaaagatagctaaaatgatgagagaaaagcgtgaacttcttgctggaatagatactattaactgtggaaagccaaccccatacgcattgttcgatatagatagctgcgcagacatgtttgagtattatgctgaagtggcagaaaccgacaaccctacagttaaggttcccttacctaacaatccaggattttgcgcatttgaaaaacgttttcctagaggtgtcatcggtgtcattactccatggaatttccctctgaaaatggctttatggaagctggttccagctattgcaagcggtaattgcgtagttttaaaaccttcagagttagccccatggtcatgccttgaattcgcactgatttgcaaggaagcgggtttgcccgatggtgttttgaatgttatcattggatctggtaaagagtcgggagctgcacttagctgtcatcctaagattgcctatctagcatttacaggatccttggctaccggaaaaaagattatgcatgctgctgctgaaaatattgtcccgttaacccttgaacttgggggtaagtcacctctaataatttgtgaagatgcggatctttctctcgctattccttctgcagcctttgctattttctttaatcaaggtgaagcctgtactgcggcttctcgtttgatcgttcatgaaagtgttgcggatgaagtacttggcggcttagtgagtgaagctaataaactaataattggaaatggattggatcctcaagtaaccttgggccctgtagtgagcaaaacccagtttgaaaaaattgttagctacattcaatcagctataaatgaaggatgtaaatgtgtagtaggtggacttcccagatctgaacaaaaaggttattttattccacccaccgtatttacgaatgtgcaaactcacaacaagatttggagagaggaaatctttgggcctgtcttagctgtgaagacattccatacaaatgaggaagcattggagttggctaatgactctgaatatggacttggttccggtgttttttctacaaatcctaaaacccttgaatttttcagcaataacattgaggcaggtatgtgctcattaaataactatcatgttgttacacacgagcttccatggattggatggaagcactctggattaggtgttggcttatctaagcacggctacaatgagtacatgcgtctcaaacaaatcactcagtatgttggctaa

SEQ ID NO: 472 - protein, 500 aa, Schizosaccharomyces pombe
MTIDLNVIQSDIISARRAPENSLFIDGKFVSPIEPAAKPIPLINPATEEIIGTCANASAKDVDSAVENAYNTFRSGIWAKWPGKQRGLVLRKIAKMMREKRELLAGIDTINCGKPTPYALFDIDSCADMFEYYAEVAETDNPTVKVPLPNNPGFCAFEKRFPRGVIGVITPWNFPLKMALWKLVPAIASGNCVVLKPSELAPWSCLEFALICKEAGLPDGVLNVIIGSGKESGAALSCHPKIAYLAFTGSLATGKKIMHAAAENIVPLTLELGGKSPLIICEDADLSLAIPSAAFAIFFNQGEACTAASRLIVHESVADEVLGGLVSEANKLIIGNGLDPQVTLGPVVSKTQFEKIVSYIQSAINEGCKCVVGGLPRSEQKGYFIPPTVFTNVQTHNKIWREEIFGPVLAVKTFHTNEEALELANDSEYGLGSGVFSTNPKTLEFFSNNIEAGMCSLNNYHVVTHELPWIGWKHSGLGVGLSKHGYNEYMRLKQITQYVG

SEQ ID NO: 473 - DNA, 1797 bp, Spinacia oleracea
  CDS (68)..(1561)
cgttgcgtgctcgccttaccctctcaactcaatttcttcaacccaatttcttcgcatttaaccaagaatggcgttcccaattcctgctcgtcagctattcatcgacggagagtggagagaacccattaaaaaaaatcgcatacccgtcatcaatccgtccactgaagaaatcatcggtgatattccggcagccacggctgaagatgtggaggttgcggtggtggcagctcgaagagcctttaggaggaacaattggtcagcaacatctggggctcatcgtgccacatacttgcgtgctattgctgctaagataacagaaaaaaaagatcatttcgttaaactggaaaccattgattctgggaaaccttttgatgaagcagtgctggacattgatgacgttgcttcatgttttgaatattttgccggacaagcagaagctcttgatggtaaacaaaaggctccagtcaccctgcctatggaaaggttcaaaagtcatgttctcaggcagccccttggtgttgttggattaatatccccatggaattacccacttctaatggctacatggaaaattgctccagcacttgctgctgggtgtacagctgtacttaagccatccgagttggcatctgtgacttgtctagaattcggtgaagtttgcaacgaagtgggacttcctccaggcgtgttgaatatcttgacaggattaggtccagatgctggtgcaccattagtatcacaccccgatgttgacaagattgcctttactgggagtagtgccactggaagcaaggttatggcttctgctgcccaattggttaagcctgttacattagaacttgggggtaaaagtcctattgtagtgtttgaagatgttgatattgataaagttgtggaatggactatttttggctgtttctggacaaatggtcaaatatgtagtgcaacgtctagactgcttgtgcatgaaagtattgcagctgagtttgttgataagcttgtaaaatggacgaaaaacattaaaatttctgacccatttgaagaaggatgccggcttggccctgttattagtaaaggacagtacgacaaaattatgaagttcatatcaacagcaaagagtgagggggcaactattttgtatggaggttcccgtcctgagcatttgaagaaaggttattacattgaacccaccattgtaactgatatctccacatccatgcaaatatggaaagaggaagtttttggccctgtcttgtgtgttaaaacatttagttccgaagatgaagccattgcattggcaaatgatacagagtacggtttagctgctgctgtgttttctaatgatcttgaaagatgtgagaggataacgaaggctctagaagttggagctgtttgggttaattgctcacaaccatgctttgttcaagctccttggggaggcatcaagcgtagtggttttggacgtgaacttggagaatggggtatccagaattacttgaatatcaagcaggtgactcaagatatttctgatgaaccatggggatggtacaagtctccttgaagctatgatcaaatttgaatgacggtgttgtttttgttaagtgagcagcggttggactgtaccttgaaatggttcgcagagaaggtcgagtttacagtaaaaatggattgaataaagggttggttgatgcagaagtccaacaagcatagcttaattttgttgtatcatgtaatagtgtgtattatttcagacaattgagttggatcagaaataagatgatacagagtttgacaatg

SEQ ID NO: 474 - protein, 497 aa, Spinacia oleracea
MAFPIPARQLFIDGEWREPIKKNRIPVINPSTEEIIGDIPAATAEDVEVAVVAARRAFRRNNWSATSGAHRATYLRAIAAKITEKKDHFVKLETIDSGKPFDEAVLDIDDVASCFEYFAGQAEALDGKQKAPVTLPMERFKSHVLRQPLGVVGLISPWNYPLLMATWKIAPALAAGCTAVLKPSELASVTCLEFGEVCNEVGLPPGVLNILTGLGPDAGAPLVSHPDVDKIAFTGSSATGSKVMASAAQLVKPVTLELGGKSPIVVFEDVDIDKVVEWTIFGCFWTNGQICSATSRLLVHESIAAEFVDKLVKWTKNIKISDPFEEGCRLGPVISKGQYDKIMKFISTAKSEGATILYGGSRPEHLKKGYYIEPTIVTDISTSMQIWKEEVFGPVLCVKTFSSEDEAIALANDTEYGLAAAVFSNDLERCERITKALEVGAVWVNCSQPCFVQAPWGGIKRSGFGRELGEWGIQNYLNIKQVTQDISDEPWGWYKSP

SEQ ID NO: 475 - DNA, 1464 bp, Rhizobium meliloti
  CDS (1)..(1464): transl_table=11
atgagagcccaaccgaaagcctcgcacttcatcgacggcgaatatgtcgaggacgccgccggcacggtgatcgagagcatctatccggcgaccggcgaaatcatcgcccggctccatgccgcaacgcctgggatcgtcgagaaggcgatcgccgcggccaagcgcgcgcagccggaatgggcggcgatgagcccgacggcgcgcggccgcatcctgaagcgggccgccgagctcatgcgccagcgcaaccgcgagctttccgaactcgaaacgctcgacaccggcaagccgatccaggaaaccatcgtcgccgacccgacgtccggcgccgacagtttcgaattcttcggcggcgtcgcgcccgccgcactcaacggcgattatatcccgctcggcggcgacttcgcctatacgaagcgggtgccgctcggcgtctgcgtcggcatcggcgcctggaactatccgcagcagatcgcctgctggaagggtgcgcctgcgctcgtcgccggcaatgcgatggtgttcaagccttcggaaaacaccccgctcggcgcgcttaagatcgccgaaatccttatcgaagcgggtctgccgaagggcctgttcaacgtcatccagggcgaccgcgcgacgggcccgctcctcgtcaaccatccggacgtcgccaaggtgtcgctcaccggctccgtgccgacgggcaaaaaagtcgcgggcgccgcggcggccgaactcaagcacgtcaccatggagctcggcggcaagtcgccgctgatcgtcttcgacgatgccgatctcgaaagcgcgatcggcggcgccatgctcggcaatttctattcgaccggccaggtctgctccaacggcacgcgcgtcttcgtgcaaaggaagatcaaggagcctttcctcgcccgcctcaaggaacgcaccgaagcgatcgtcatcggcgaccccctggacgaggcgacgcagctcggtccgatggtctcggcggcgcaacgcgacaaggtcttctcctatatcgggaagggcaaggcggaaggcgcccgcctcgtcaccggcggcggcattcccaataatgtgagcggcgaaggcacctatatccagccgaccgtcttcgccgacgtcaccgacgggatgacgatcgcgcgcgaagaaatcttcggaccggtcatgtgcgtgctcgacttcgacgacgaggtggaagtcatcgcacgcgccaacgccaccgaattcggcctttcggccggcgtcttcaccgcggacctcacccgcgcccaccgggtcgccgaccggctcgaagccggcacgctctggatcaacacctacaatctctgcccggtcgagatcccctttggcgggtccaagcaatcgggtttcgggcgggagaattcggtcgcggcgctcaaccactataccgagctcaagaccgtctatgtcggcatggggccggtcgaggcgccgtattga

SEQ ID NO: 476 - protein, 487 aa, Rhizobium meliloti
MRAQPKASHFIDGEYVEDAAGTVIESIYPATGEIIARLHAATPGIVEKAIAAAKRAQPEWAAMSPTARGRILKRAAELMRQRNRELSELETLDTGKPIQETIVADPTSGADSFEFFGGVAPAALNGDYIPLGGDFAYTKRVPLGVCVGIGAWNYPQQIACWKGAPALVAGNAMVFKPSENTPLGALKIAEILIEAGLPKGLFNVIQGDRATGPLLVNHPDVAKVSLTGSVPTGKKVAGAAAAELKHVTMELGGKSPLIVFDDADLESAIGGAMLGNFYSTGQVCSNGTRVFVQRKIKEPFLARLKERTEAIVIGDPLDEATQLGPMVSAAQRDKVFSYIGKGKAEGARLVTGGGIPNNVSGEGTYIQPTVFADVTDGMTIAREEIFGPVMCVLDFDDEVEVIARANATEFGLSAGVFTADLTRAHRVADRLEAGTLWINTYNLCPVEIPFGGSKQSGFGRENSVAALNHYTELKTVYVGMGPVEAPY

SEQ ID NO: 477 - DNA, 1446 bp, Rhizobium meliloti
  CDS (1)..(1446): transl_table=11
atggcgacgccgctctgtcagccggccgcttcacattttatcgacggcacctttattgaggatcgcaccggtcctgagatcctctccgtcaatccggtggatggtgagatcatcgccaaattgcatggggcgacttcctgcatcatcgagaaggcaattgcctcggcgaaacgggcgcagaaagaatgggctcggaaagagccggcggagcggggtcgcgtcctcagtcgcgccgctgacatcatgcgggcgcgaaacagggaactgtcggttctcgaaacgcgcgatacaggcaagccaatttctgaaacactggtggcggacgccgctagcggtgccgattgcctcgagtattttggcgcaatcgcggcgacactttcgggagacagcatccagttcggagaagattgggtctacacacggcgggagccgcttggggtctgtctcggaataggggcctggaactaccccatccagattgcggcctggaaggcagcccccgcgcttgcttgcgggaatgccatgatattcaagccgtcggaagtgaccccattgtcagcgctcaagctcgcggaaattctgactgaagcggggcttcctcctggcgttttcaatattgtgcaaggtgccggtgatgttggggctgagctcgccacccatccggcgatcgccaaagtctccctcaccggctcggtcaagactggcgcgagggtcgcctcggccgccatggccggcatccggccagtaacgatggagcttggtggaaagtctgcgctgatcgtcttcgacgatgcagatgttgaggcagccgtcagcggcgcaattctcgggaatttttattcggccggccagatctgctcaaacggtacgcgcgttttcctgcagcgcggaataagggaagcgttccttgcgcgcttgctggcccgggtcgcggctttgaagattggtgatccgatggacgaggagaccgacatcgggccgctagtcagcgccgcccatcgcaaccgggttgccacatacgtcgcccgcgccgaggttgagggagcataccagatggcgcctccgcgcaagcttccaccaggggatgcctggcacgagcccgtagtcttcacgaatgttacggattggatgacgcttgctcgggaagaagtgttcggtccggtcatggccgtcctggacttcgatgacgagcaagatgtcgtcgcaagagccaatgcaacggacttcggattggcagcaggcatattcacgagagacctcgttcgtgcccataggttggcggctgagctcgaagccggaaccgtgtggatcaacgcttacaacttgacgccagctggcatggcgttcggcggaatcaagagatcaggcatcgggcgcgaaaacgggcgtgtcgcgatcgaccactatacccagctcaagtctgtgttcgtcagcatgcagacataa

SEQ ID NO: 478 - protein, 481 aa, Rhizobium meliloti
MATPLCQPAASHFIDGTFIEDRTGPEILSVNPVDGEIIAKLHGATSCIIEKAIASAKRAQKEWARKEPAERGRVLSRAADIMRARNRELSVLETRDTGKPISETLVADAASGADCLEYFGAIAATLSGDSIQFGEDWVYTRREPLGVCLGIGAWNYPIQIAAWKAAPALACGNAMIFKPSEVTPLSALKLAEILTEAGLPPGVFNIVQGAGDVGAELATHPAIAKVSLTGSVKTGARVASAAMAGIRPVTMELGGKSALIVFDDADVEAAVSGAILGNFYSAGQICSNGTRVFLQRGIREAFLARLLARVAALKIGDPMDEETDIGPLVSAAHRNRVATYVARAEVEGAYQMAPPRKLPPGDAWHEPVVFTNVTDWMTLAREEVFGPVMAVLDFDDEQDVVARANATDFGLAAGIFTRDLVRAHRLAAELEAGTVWINAYNLTPAGMAFGGIKRSGIGRENGRVAIDHYTQLKSVFVSMQT

SEQ ID NO: 479 - DNA, 1482 bp, Agrobacterium tumefaciens
  CDS (1)..(1482): transl_table=11
atgaccattgcgacgccgctcaaggcgcagccgaaagcctcgcatttcatcgacggggattatgtcgaggacaataccggcacgccgttcgagagcatcttccctgcaacgggcgaaatgattgcaaaactgcatgcggcaacgcccgccatcgtcgagcgcgccatcgcctcggccaagcgcgcccagaaggaatgggcggcgatgagccccatggcccgcggtcgcatcctcaagcgcgccgccgatatcatgcgcgaacgcaacgatgcgctttccacgctcgagacgctggataccggcaagccaatccaggaaaccatcgtcgccgatcccacctccggcgccgatgccttcgagtttttcggcggcatcgcaccttccgcgctgaatggcgattatatccccctcggcggcgatttcgcctataccaagcgcgtgccgctcggtgtctgcgttggtatcggcgcctggaactatccgcagcagattgcctgctggaaggctgcaccggccctcgtcgccggcaatgccatggtcttcaagccctcggaaaacaccccgctcggtgccctgaagatcgccgaaatcctgatcgaggcgggcctgccaaaaggcctcttcaacgtcattcagggtgatcgcgataccggcccacttctagtcaatcatcccgatgtcgccaaggtctctctcaccggctcggtgccgaccggtcgcaaggtggcggccgccgctgccgggcatctgaaacatgtgacgatggaactcggtggcaagtcgccgatgatcgtcttcgacgacgccgatattgaaagtgccgtcggtggggccatgctcggcaacttctattcttccggccaggtctgctcgaacggcacgcgtgtcttcgtgcagaaaaaggcgaaggcgcgtttcctcgaaaacctgaaacgccgcaccgaggcgatgatcctcggcgaccccttggattacgccacccatctcggcccgctggtctccaaggcccagcaggaaaaggttctgtcctatatcgaaaagggcaaggcagagggtgcaacgctgatcaccggcggcggcattcccaataatgtcgcgggtgagggcgcctatgttcagccgactgtctttgccgatgtcaccgacgacatgaccatcgcccgcgaggaaatcttcgggcctgtcatgtgcgttctggatttcgacgatgaggacgaggttctcgcccgcgccaacgccaccgaattcggccttgccggcggcgtctttaccgccgacctcgcccgcgcccaccgtgtggtggatgggctggaggcgggcacgctctggatcaacacctacaatctctgcccggtggaaattccctttggcggctccaagcaatccggtttcggacgggagaattccgccgcggcgctggagcattatagcgaattgaagaccgtttatgtcagcacggggaaggtggacgcgccttattaa

SEQ ID NO: 480 - protein, 493 aa, Agrobacterium tumefaciens
MTIATPLKAQPKASHFIDGDYVEDNTGTPFESIFPATGEMIAKLHAATPAIVERAIASAKRAQKEWAAMSPMARGRILKRAADIMRERNDALSTLETLDTGKPIQETIVADPTSGADAFEFFGGIAPSALNGDYIPLGGDFAYTKRVPLGVCVGIGAWNYPQQIACWKAAPALVAGNAMVFKPSENTPLGALKIAEILIEAGLPKGLFNVIQGDRDTGPLLVNHPDVAKVSLTGSVPTGRKVAAAAAGHLKHVTMELGGKSPMIVFDDADIESAVGGAMLGNFYSSGQVCSNGTRVFVQKKAKARFLENLKRRTEAMILGDPLDYATHLGPLVSKAQQEKVLSYIEKGKAEGATLITGGGIPNNVAGEGAYVQPTVFADVTDDMTIAREEIFGPVMCVLDFDDEDEVLARANATEFGLAGGVFTADLARAHRVVDGLEAGTLWINTYNLCPVEIPFGGSKQSGFGRENSAAALEHYSELKTVYVSTGKVDAPY

SEQ ID NO: 481 - DNA, 1464 bp, Brucella abortus
  CDS (1)..(1464): transl_table=11
atgaaagcacagcccaaagcctcgcacttcattggcggcgcattcgtggaagacaaggcgggcaagccgctgcccgtgatctatccggcaaccggcgaggaaatcgccagtctttattccgcgacgccaggcattatcgaagcggcttacgcagcagcactgaaagcgcaaggcgaatgggcagcattgaaacccgtcgagcgcgggcgcatcctgcgccgcacggcggaaatcctgcgcgagaagaaccggaaattgtcgaagctcgaaacgctggataccggcaaggcgcttcaggaaacgctcgttgcagatgccgcttcggctgccgatgcgctggagtttttcggcggcattatttccggcttcaatggcgagttcgtggagcttggcggctcgtttgcctatacacgccgcgaggcactcggcatctgcgtcggtatcggcgcatggaactatccgatccagatcgcagcgtggaaatcggcaccggcgcttgccatgggcaatgccttcatcttcaaaccatccgaaaacacgccgctttcagcactggcactggcggaagcctataaggaagcggggcttcctgacgggctgttcaatgtcgtgcagggttatggcgatgtgggtgctgcgctcgtcaatcatcgcctgacggcaaaggtttcgctgacgggttccgtgccgaccggcagacgcatcatggcgcaggctggcgaacagctgaaacatgtcaccatggagcttggcggcaagtcgccgctcatcgtcttcgatgacgccgaccttgaaagcgccatcggcggcgcaatgctcggcaatttctattcgaccggtcaggtctgctcgaacggcacccgcgtcttcgttcacaagaatatccgcgaacgtttcatcgagcgccttgtcgagcgcacgcgaaaaatccgtatcggcgatcccttcgatgaagccacgcagatgggtccgctcatcagcgccgcccagcgcgacaaggttctatcctatatcaaaaaaggcaaggcggaaggcgcaacacttgcctgtggcggcggcgtgccgaaattgcagggcttcgataagggcttcttcatcgagccgacggtctttgcagatgttaccgacactatgaccatcgcacgcgaggaaatcttcgggccggtgatgagcgtgctggaattttccgatgaggacgaagtgattgcgcgcgccaatgatagcgaattcggccttgcggcaggcgtcttcactgccgatctttcccgcgggcatcacgtgatcggccagatcaaggccggcacatgctggatcaatgcctataatctgacgcccgtggaagtgcctttcggcggctacaagcaatcgggcatcggccgtgaaaacgggatcgccgcgcttgcccattacagccagatcaagaccgtctatgtggagatgggcaaggtagacagcccctactga

SEQ ID NO: 482 - protein, 487 aa, Brucella abortus
MKAQPKASHFIGGAFVEDKAGKPLPVIYPATGEEIASLYSATPGIIEAAYAAALKAQGEWAALKPVERGRILRRTAEILREKNRKLSKLETLDTGKALQETLVADAASAADALEFFGGIISGFNGEFVELGGSFAYTRREALGICVGIGAWNYPIQIAAWKSAPALAMGNAFIFKPSENTPLSALALAEAYKEAGLPDGLFNVVQGYGDVGAALVNHRLTAKVSLTGSVPTGRRIMAQAGEQLKHVTMELGGKSPLIVFDDADLESAIGGAMLGNFYSTGQVCSNGTRVFVHKNIRERFIERLVERTRKIRIGDPFDEATQMGPLISAAQRDKVLSYIKKGKAEGATLACGGGVPKLQGFDKGFFIEPTVFADVTDTMTIAREEIFGPVMSVLEFSDEDEVIARANDSEFGLAAGVFTADLSRGHHVIGQIKAGTCWINAYNLTPVEVPFGGYKQSGIGRENGIAALAHYSQIKTVYVEMGKVDSPY

SEQ ID NO: 483 - DNA, 1464 bp, Brucella suis
  CDS (1)..(1464): transl_table=11
atgaaagcacaacccaaagcctcgcacttcattggcggcgcattcgtggaagacaaggcgggcaagccgctgcccgtgatctatccggcaaccgacgaggaaatcgccagtctttattccgcgacgccaggcattatcgaagcggcttacgcagcagcactgaaagcgcaaggcgaatgggcagcattgaaacccgtcgagcgcgggcgcatcctgcgccgcacggcggaaatcctgcgcgagaagaaccggaaattgtcgaagctcgaaacgctggataccggcaaggcgcttcaggaaacgctcgttgcagatgccgcttcggctgccgatgcgctggagtttttcggcggcattatttccggcttcaatggcgagttcgtggagcttggcggctcgtttgcctatacacgccgcgaggcactcggcatctgcgtcggtatcggcgcatggaactatccgatccagatcgcagcgtggaaatcggcaccggcgcttgccatgggcaatgccttcatcttcaaaccatccgaaaacacgccgctttcagcactggcactggcggaagcctataaggaagcggggcttcctgacgggctgttcaatgtcgtgcagggttatggcgatgtgggtgctgcgctcgtcaatcatcgcctgacggcaaaggtttcgctgacgggttccgtgccgaccggcagacgcatcatggcgcaggctggcgaacagctgaaacatgtcaccatggagcttggcggcaagtcgccgctcatcgtcttcgatgacgccgaccttgaaagcgccatcggcggcgcaatgctcggcaatttctattcgaccggtcaggtctgctcgaacggcacccgcgtcttcgttcacaagaatatccgcgaacgtttcatcgagcgccttgtcgagcgcacgcgaaaaatccgtatcggcgatcccttcgatgaagccacgcagatgggtccgctcatcagcgccgcccagcgcgacaaggttctatcctatatcaaaaaaggcaaggcggaaggcgcaacacttgcctgtggcggcggcgtgccgaaattgcagggcttcgataagggcttcttcatcgagccgacggtctttgcagatgttaccgacactatgaccatcgcacgcgaggaaatcttcgggccggtgatgagcgtgctggaattttccgatgaggacgaagtgattgcgcgcgccaatgatagcgaattcggccttgcggcaggcgtcttcactgccgatctttcccgcgggcatcacgtgatcggccagatcaaggccggcacatgctggatcaatgcctataatctgacgcccgtggaagtgcctttcggcggctacaagcaatcgggcatcggccgtgaaaacgggatcgccgcgcttgcccattacagccagatcaagaccgtctatgtggagatgggcaaggtagacagcccctactga

SEQ ID NO: 484 - protein, 487 aa, Brucella suis
MKAQPKASHFIGGAFVEDKAGKPLPVIYPATDEEIASLYSATPGIIEAAYAAALKAQGEWAALKPVERGRILRRTAEILREKNRKLSKLETLDTGKALQETLVADAASAADALEFFGGIISGFNGEFVELGGSFAYTRREALGICVGIGAWNYPIQIAAWKSAPALAMGNAFIFKPSENTPLSALALAEAYKEAGLPDGLFNVVQGYGDVGAALVNHRLTAKVSLTGSVPTGRRIMAQAGEQLKHVTMELGGKSPLIVFDDADLESAIGGAMLGNFYSTGQVCSNGTRVFVHKNIRERFIERLVERTRKIRIGDPFDEATQMGPLISAAQRDKVLSYIKKGKAEGATLACGGGVPKLQGFDKGFFIEPTVFADVTDTMTIAREEIFGPVMSVLEFSDEDEVIARANDSEFGLAAGVFTADLSRGHHVIGQIKAGTCWINAYNLTPVEVPFGGYKQSGIGRENGIAALAHYSQIKTVYVEMGKVDSPY

SEQ ID NO: 485 - DNA, 1470 bp, Burkholderia mallei
  CDS (1)..(1470): transl_table=11
atgtccgtatacggtctgcagcgcctttacatcgccggcgcccacgccgacgccacgagcggcaagacgttcgatacgttcgatcccgcgacgggcgaattgctcgcgcgcgttcagcaggcgagcgccgacgatgtcgaccgcgcggtcgcatccgcgcgcgaaggccagcgcgaatgggccgcgatgaccgcgatgcagcgctcgcgcatcctgcgtcgcgcggtcgaattgctgcgcgagcgcaacgacgcgctcgccgagctcgagatgcgcgacacgggcaagccgatcgcggaaacgcgcgccgtcgatatcgtcacgggcgccgacgtgatcgagtactacgcgggcctcgcgaccgcgatcgaaggtctgcaggtgccgctgcgcccggaatcgttcgtctacacgcggcgcgagccgctcggcgtgtgcgcgggcatcggcgcatggaactacccgatccagatcgcctgctggaagagcgcgcccgcgctcgccgccggcaacgcgatgatcttcaagccgagcgaagtcacgccgctgtccgcgctcaagctcgcggagatctacaccgaggcgggagtgcccgccggcgtgttcaacgtcgtgcagggcgacggctcggtcggcgcgctgctcagcgcgcacccgggcatcgcgaaggtgtcgtttacgggcggcgtcgaaaccggcaagaaggtgatgtcgctcgcgggcgcatcgtcgctgaaggaagtgacgatggaactgggcggcaaatcgccgctcatcgtgttcgacgacgccgatctcgaccgcgcggccgacatcgccgtcaccgcgaacttcttcagcgcgggccaggtgtgcacgaacggcacgcgcgtgttcgtccagcaagcggtgaaggacgcgttcgtcgagcgcgtgctcgcgcgcgtcgcacggattcgggccggcaaaccttcggatcccgacacgaatttcggaccgctcgcgagcgccgcccagctcgacaaggtgctcggctacatcgacagcggcaaggccgaaggcgcgaagctgctcgcgggcggcgcgcgcctcgtgaacgatcacttcgcgagcggccagtacgttgcgccgaccgtgttcggcgattgccgcgacgacatgaggatcgtccgcgaagagattttcgggccggtgatgagcatcctgtcgttcgaaacggaagacgaagcgatcgcgcgcgcgaacgcgaccgactacggcctcgcggcgggcgtcgtcaccgagaacctgtcgcgcgcgcaccgcgcgatccatcgcctcgaagccggcatctgctggatcaacacgtggggcgaatcgcccgccgagatgccggttggcgggtataagcaatccggcgtcggacgcgagaacggcatcacgacgctcgagcactacactcgaatcaaatcggtgcaggtcgagctcggccgctatcaaccggtgttctaa

SEQ ID NO: 486 - protein, 489 aa, Burkholderia mallei
MSVYGLQRLYIAGAHADATSGKTFDTFDPATGELLARVQQASADDVDRAVASAREGQREWAAMTAMQRSRILRRAVELLRERNDALAELEMRDTGKPIAETRAVDIVTGADVIEYYAGLATAIEGLQVPLRPESFVYTRREPLGVCAGIGAWNYPIQIACWKSAPALAAGNAMIFKPSEVTPLSALKLAEIYTEAGVPAGVFNVVQGDGSVGALLSAHPGIAKVSFTGGVETGKKVMSLAGASSLKEVTMELGGKSPLIVFDDADLDRAADIAVTANFFSAGQVCTNGTRVFVQQAVKDAFVERVLARVARIRAGKPSDPDTNFGPLASAAQLDKVLGYIDSGKAEGAKLLAGGARLVNDHFASGQYVAPTVFGDCRDDMRIVREEIFGPVMSILSFETEDEAIARANATDYGLAAGVVTENLSRAHRAIHRLEAGICWINTWGESPAEMPVGGYKQSGVGRENGITTLEHYTRIKSVQVELGRYQPVF

SEQ ID NO: 487 - DNA, 1470 bp, Burkholderia pseudomallei
  CDS (1)..(1470): transl_table=11
atgtccgtatacggtctgcagcgcctttacatcgccggcgcccacgccgacgccacgagcggcaagacgttcgatacgttcgatcccgcgacgggcgaattgctcgcgcgcgttcagcaggcgagcgccgacgatgtcgaccgcgcggtcgcatccgcgcgcgaaggccagcgcgaatgggccgcgatgaccgcgatgcagcgctcgcgcatcctgcgtcgcgcggtcgaattgctgcgcgagcgcaacgacgcgctcgccgagctcgagatgcgcgacacgggcaagccgatcgcggaaacgcgcgccgtcgacatcgtcacgggcgccgacgtgatcgagtactacgcgggcctcgcgaccgcgatcgaaggtctgcaggtgccgctgcgcccggaatcgttcgtctacacgcggcgcgagccgctcggcgtgtgcgcgggcatcggcgcatggaactacccgatccagatcgcctgctggaagagcgcgcccgcgctcgccgccggcaacgcgatgatcttcaagccgagcgaagtcacgccgctgtccgcgctcaagctcgcggagatctacaccgaggcgggagtgcccgccggcgtgttcaacgtcgtgcagggcgacggctcggtcggcgcgctgctcagcgcgcacccgggcatcgcgaaggtgtcgtttacgggcggcgtcgaaaccggcaagaaggtgatgtcgctcgcgggcgcatcgtcgctgaaggaagtgacgatggaactgggcggcaaatcgccgctcatcgtgttcgacgacgccgatctcgaccgcgcggccgacatcgccgtcacagcgaacttcttcagcgcgggtcaggtgtgcacgaacggcacgcgcgtgttcgtccagcaagcggtgaaggacgcgttcgtcgagcgcgtgctcgcgcgcgtcgcacggattcgggtcggcaaaccttcggatcccgacacgaatttcggaccgctcgcgagcgccgcccagctcgacaaggtgctcggctacatcgacagcggcaaggccgaaggcgcgaaactgctcgcgggcggcgcgcgcctcgtgaacgatcacttcgcgagcggccagtacgttgcgccgaccgtgttcggcgattgccgcgacgacatgaggatcgtccgcgaagagattttcgggccggtgatgagcatcctgccgttcgaaacggaagacgaagcgatcgcgcgcgcgaacgcgaccgactacggcctcgcggcgggcgtcgtcaccgagaacctgtcgcgcgcgcaccgcgcgatccatcgcctcgaagccggcatctgctggatcaacacgtggggcgaatcgcccgccgagatgccggttggcgggtataagcaatccggcgtcggacgcgagaacggcatcacgacgctcgagcactacactcgaatcaaatcggtgcaggtcgagctcggccgctatcaaccggtgttctaa

SEQ ID NO: 488 - protein, 489 aa, Burkholderia pseudomallei
MSVYGLQRLYIAGAHADATSGKTFDTFDPATGELLARVQQASADDVDRAVASAREGQREWAAMTAMQRSRILRRAVELLRERNDALAELEMRDTGKPIAETRAVDIVTGADVIEYYAGLATAIEGLQVPLRPESFVYTRREPLGVCAGIGAWNYPIQIACWKSAPALAAGNAMIFKPSEVTPLSALKLAEIYTEAGVPAGVFNVVQGDGSVGALLSAHPGIAKVSFTGGVETGKKVMSLAGASSLKEVTMELGGKSPLIVFDDADLDRAADIAVTANFFSAGQVCTNGTRVFVQQAVKDAFVERVLARVARIRVGKPSDPDTNFGPLASAAQLDKVLGYIDSGKAEGAKLLAGGARLVNDHFASGQYVAPTVFGDCRDDMRIVREEIFGPVMSILPFETEDEAIARANATDYGLAAGVVTENLSRAHRAIHRLEAGICWINTWGESPAEMPVGGYKQSGVGRENGITTLEHYTRIKSVQVELGRYQPVF

SEQ ID NO: 489 - DNA, 1470 bp, Halomonas elongata
  CDS (1)..(1470): transl_table=11
atgaccgctcaaagcgcacaacccctctatattggtggtcgcccggttgatgccacctccggcgaaacatttaccgttaccaatccttatgatggcagtctgctggccacgattggtcaggcaagccaagccgatgtcgatagcgccgttcaggcagcacagcgtggccagcgtgaatgggccgccatgaccggcatggagcgctcacgcatcctgctacgtgccgtagcacttcttcgcgagcgtaatgacgagcttgccgagctggaaacccgcaataccggcaagccgatcagcgaaaccgccagcgtcgatatcgtgaccggtgccgatgctctggagtactacgcaggccttgccccggccattgagggcagccaaattcccctgcgcgatactcggcttgtttacacccgccgcgagccgctaggtgtgatcggcgccattggtgcctggaactacccgattcaaatcgcctgctggaaagcggctccggcactcgccgctggcaacgccatcgtgttcaagcccagtgaagtcacaccgctaacggcgcttaagcttgccgaaatcttcactgaagcaggcttgcccgacggtgtatttaacgtggtacagggcgatggtcgcgtcggcgccatgctgaccgagcacgaaggcattgccaaagtctcgtttaccggtgaagtgggcacaggcaaaaaagtcatggccgctgccggtggttccacgctgaaagacgtaacaatggaactcggcggcaaatctccgctaattgtcttcgcggatgccgacctcgaccgcgcagccgatgccgccatgatggcgaacttctactccagcggccaaatctgcaccaacggcactcgcgtgttcgttgagcgcagcgctaaagaggcgttcgaagccaagctagtagagcgcgtggcacgcatcaaagcaggcgacccgatggatccgagcgtcaatttcggtccgcttgtcagcttcgagcatcaggaaaaagtgctctcctacatcgcgctcggcaaagagcaaggcgcacgcgtgctggccggtggcgacgcgtggaacagcggcgaatgggccaaaggcgcctgggcggcccccacggtattcactgactgcaccgacgagatgcgtgtcgtcaaagaggagatctttggcccggtaatgtcagtactcgccttcgacgacgaagaggaagtcatccgccgcgccaacaacaccaagtacggcctagccgccggcgtcttcagcgaaagcctgaaccgcgcgcaccgtgtgattcaccagctggaagccggcatctgctggatcaacacctggggagagtcgccgtcggagatgccggtaggcggttacaaggagtcgggcattggtcgcgagaacggcgtcgagacgctcaatcactacacccagaccaagtccgtacagatcgagatggggccgttcgagtcggtgttttaa

SEQ ID NO: 490 - protein, 489 aa, Halomonas elongata
MTAQSAQPLYIGGRPVDATSGETFTVTNPYDGSLLATIGQASQADVDSAVQAAQRGQREWAAMTGMERSRILLRAVALLRERNDELAELETRNTGKPISETASVDIVTGADALEYYAGLAPAIEGSQIPLRDTRLVYTRREPLGVIGAIGAWNYPIQIACWKAAPALAAGNAIVFKPSEVTPLTALKLAEIFTEAGLPDGVFNVVQGDGRVGAMLTEHEGIAKVSFTGEVGTGKKVMAAAGGSTLKDVTMELGGKSPLIVFADADLDRAADAAMMANFYSSGQICTNGTRVFVERSAKEAFEAKLVERVARIKAGDPMDPSVNFGPLVSFEHQEKVLSYIALGKEQGARVLAGGDAWNSGEWAKGAWAAPTVFTDCTDEMRVVKEEIFGPVMSVLAFDDEEEVIRRANNTKYGLAAGVFSESLNRAHRVIHQLEAGICWINTWGESPSEMPVGGYKESGIGRENGVETLNHYTQTKSVQIEMGPFESVF

SEQ ID NO: 491 - DNA, 1473 bp, Pseudomonas aeruginosa
  CDS (1)..(1473): transl_table=11
atggcccgattcgaagaacagaagctctacattggcggtcgctacgtggaggccagcagtggcgccaccttcgagaccatcaacccggccaacggcgaagtgctcgccaaggtccagcgggcttccagggaagacgtcgagcgggccgtgcagagcgccgtcgaggggcagaaggtgtgggcggcgatgaccgccatgcagcgctcgcgcattctccgtcgcgccgtcgacatcctccgcgagcgcaacgacgaactggctgccctggaaaccctggataccggcaagccgctggcggaaacccgctcggtggacatcgtcaccggcgccgacgtgctcgagtactacgccggcctggtcccggccatcgaaggcgagcagattcccctgcgcgaaaccagtttcgtctacacccgccgcgagccgctgggcgtggtcgccggcattggcgcctggaactacccggtgcagatcgccctgtggaaatccgccccggccctcgctgccggcaacgcgatgatcttcaagcccagcgaagtcaccccgctgacggccctcaagctggccgagatctacaccgaggccggcgtgccggacggcgtgttcaacgtgctcaccggcagcggacgcgaagtcggccagtggctgaccgagcacccgctgatcgagaagatctccttcaccggtggcacctccaccggcaagaaagtcatggccagcgcttccagctcgtcgctgaaggaagtgaccatggagctgggcggcaagtccccgctgatcatcttccccgacgcagacctcgaccgcgccgccgacatcgccgtcatggccaacttcttcagctccggccaggtctgcaccaacggcacccgggtgttcatccaccgttcccagcaggctcgcttcgaagccaaggtactggagcgcgtgcagcgcatccgtctcggcgacccgcaggacgagaacaccaacttcggcccgctggtcagcttcccgcacatggaaagcgtgctcggctacatcgagtccggcaaggcgcagaaggctcgcctgctgtgcggcggcgagcgtgtgaccgatggagcgttcggcaaaggtgcctacgtcgcgccgaccgtgttcaccgattgccgcgacgacatgaccatcgtccgcgaggaaatcttcggcccggtgatgagcatcctggtctatgacgacgaagacgaggcgatccgccgcgccaacgataccgagtacggcctcgccgccggcgtcgtgacccaggacctggcccgcgcccaccgcgccatccatcgcctggaagccggcatctgctggatcaatacctggggcgagtcgccggcggaaatgccggtcggcggttacaagcaatccggtgtcggtcgcgagaacggtctcaccaccctggctcattacactcgcatcaagtccgtgcaagtggagctgggcgactacgcctcggtgttctga

SEQ ID NO: 492 - protein, 490 aa, Pseudomonas aeruginosa
MARFEEQKLYIGGRYVEASSGATFETINPANGEVLAKVQRASREDVERAVQSAVEGQKVWAAMTAMQRSRILRRAVDILRERNDELAALETLDTGKPLAETRSVDIVTGADVLEYYAGLVPAIEGEQIPLRETSFVYTRREPLGVVAGIGAWNYPVQIALWKSAPALAAGNAMIFKPSEVTPLTALKLAEIYTEAGVPDGVFNVLTGSGREVGQWLTEHPLIEKISFTGGTSTGKKVMASASSSSLKEVTMELGGKSPLIIFPDADLDRAADIAVMANFFSSGQVCTNGTRVFIHRSQQARFEAKVLERVQRIRLGDPQDENTNFGPLVSFPHMESVLGYIESGKAQKARLLCGGERVTDGAFGKGAYVAPTVFTDCRDDMTIVREEIFGPVMSILVYDDEDEAIRRANDTEYGLAAGVVTQDLARAHRAIHRLEAGICWINTWGESPAEMPVGGYKQSGVGRENGLTTLAHYTRIKSVQVELGDYASVF

SEQ ID NO: 493 - DNA, 1473 bp, Pseudomonas fluorescens
  CDS (1)..(1473): transl_table=11
atggcccgtttcgaactgcaaaaactctacatcgacggcggctacaccgatgccggcagcgacgccactttcgatgccatcaacccggccaacggtgaagttctcgcacaagtgcagcgtgcgaccaaggaagacgttgaacgcgccgtggtcagcgccgagaaaggccagaagatctgggccgccatgaccgccatggagcgttcgcgcatcctgcgtcgcgccgtggaaatcctccgcgagcgcaacgacgaactggccgccctggaaaccctggacaccggcaaggccttctccgaaaccaagtacgtggacatcgtcaccggcgccgacgtgctggaatactacgcaggcctggtaccggccatcgaaggcgagcagatcccgctgcgcaccacttccttcgtctacacccgtcgcgagcccctgggcgtagtggccggtatcggcgcgtggaactacccgatccagatcgccctgtggaaatccgctccagccctggcggccggtaacgcgatgatcttcaaaccgagcgaagtgacctcgctgaccaccctgaaactggccgagatctacaccgaagccggcctgccggatggcgtgttcaacgtcctgaccggcagcggccgcgaagtcggcacctggctgaccgagcacccgcgcatcgagaaggtctccttcaccggcggcaccgacactggcaagaaagtcatggccagcgcttccagctcctcgctgaaagacgtgaccatggaactgggcggcaagtcgccactgatcatcttcgacgacgccgacctggatcgcgccgccgacaccgccatgatggccaacttctacagctccggtcaggtctgcaccaacggcactcgggtattcgtaccgagccacctgaaagccgctttcgaagccaagatcgccgagcgcgttgcgcgcatccgcatcggcaacccggaagacgaaaacaccaacttcggcccgctggtcagtttcccgcacatggaaagcgtgctgggctacatcgccaagggtaaagaagaaggtgcccgcgtactgtgcggcggcgagcgcctgaccgacggcgaattcgccaagggcgccttcgttgcaccgaccgtgttcaccgactgcaccgacgacatgaccatcgtccgtgaagaaatcttcggcccggtcatggcgatcctgacctacgaaaccgaagaagaagtgatccgccgcgccaacgacaccgacttcggcctggctgccggcctggtcaccaaggatctgaaccgcgctcaccgcgtgattcatcagctcgaagccggtatctgctggatcaacgcctggggcgagtccgacgccaagatgccggttggcggctacaagcagtcgggcgtgggccgtgagaacggcatcagctcgctgaacaacttcacccgcatcaagtcggtgcaggtcgagctgggcgactacgcctcggtgttctaa

SEQ ID NO: 494 - protein, 490 aa, Pseudomonas fluorescens
MARFELQKLYIDGGYTDAGSDATFDAINPANGEVLAQVQRATKEDVERAVVSAEKGQKIWAAMTAMERSRILRRAVEILRERNDELAALETLDTGKAFSETKYVDIVTGADVLEYYAGLVPAIEGEQIPLRTTSFVYTRREPLGVVAGIGAWNYPIQIALWKSAPALAAGNAMIFKPSEVTSLTTLKLAEIYTEAGLPDGVFNVLTGSGREVGTWLTEHPRIEKVSFTGGTDTGKKVMASASSSSLKDVTMELGGKSPLIIFDDADLDRAADTAMMANFYSSGQVCTNGTRVFVPSHLKAAFEAKIAERVARIRIGNPEDENTNFGPLVSFPHMESVLGYIAKGKEEGARVLCGGERLTDGEFAKGAFVAPTVFTDCTDDMTIVREEIFGPVMAILTYETEEEVIRRANDTDFGLAAGLVTKDLNRAHRVIHQLEAGICWINAWGESDAKMPVGGYKQSGVGRENGISSLNNFTRIKSVQVELGDYASVF

SEQ ID NO: 495 - DNA, 1473 bp, Pseudomonas putida
  CDS (1)..(1473): transl_table=11
atggcccgtttcggaacgcaaaaactctacattgatggcgcttacgtcgacgctggcagcgatgccactttcgaagccatcaacccggccaccggcgaagtcctcgcccacgtacagcgtgctaccgaggctgacgtcgagaaggccgtggaaagcgccgagcgtggccagaaagtctgggctgcgatgactgccatgcagcgttcgcgcatcctgcgccgcgccgtcgacatcctgcgcgagcgcaacgatgagctggccatgctggaaaccctggacaccggcaagtcgtactccgaaacccgctacgtcgacatcgttaccggcgccgacgtgctggaatactacgcaggcctggtaccggccatcgaaggcgagcagatcccgctgcgcgaatcgtccttcgtctacacccgccgcgagccgctgggcgtgaccgtgggtatcggtgcctggaactacccgatccagatcgccctgtggaaatctgccccggccctggccgctggcaacgcgatgatcttcaaaccgtcggaagtcacctcgctgaccaccctgaaactggccgagatctacaccgaagccggcctgccgaacggcgtgttcaacgttctgaccggcagcggccgcgaagtcggcacctggctgaccgagcacccgcgcatcgaaaaagtgtccttcaccggcggcaccaccaccggcaagaaagtcatggccagcgcctccagctcttcgctgaaggaagtgaccatggagctgggcggcaagtcgccactgatcatctgtgccgacgccgacctggacaaggccgctgacatcgccatgatggccaacttctacagctcgggccaggtgtgcaccaacggcacccgcgtgttcatcccggctgaaatgaaggcggccttcgaagccaagatcgccgagcgcgttgcccgcatccgcgttggcaacccggaagacgaaaacaccaacttcggcccgctggtcagcttccagcacatggaaagcgtgctgggctacatcgccaaaggcaaggaagaaggtgcccgcgtgctgtgcggcggcgagcgtctgactgccggtgacttcgccaaaggtgccttcgttgcgccgacggtgttcaccgactgcaccgacgacatgaccatcgtcaaagaagagatcttcggcccggtgatgagcatcctcacctacgaaaccgaagaagaagtgatccgccgtgccaacgacaccgactacggcctggccgccggcgtctgcaccaacgacatcacccgcgcccaccgcatcatccacaagctcgaagccggtatctgctggatcaacgcctggggtgaatcgccggccgaaatgccggtaggtggctacaagcagtcgggcgtcggccgtgaaaacggcgtcagctcgctggctcaatacactcgcatcaagtcggtccaggtcgagctgggcggctacaactcggttttctga

SEQ ID NO: 496 - protein, 490 aa, Pseudomonas putida
MARFGTQKLYIDGAYVDAGSDATFEAINPATGEVLAHVQRATEADVEKAVESAERGQKVWAAMTAMQRSRILRRAVDILRERNDELAMLETLDTGKSYSETRYVDIVTGADVLEYYAGLVPAIEGEQIPLRESSFVYTRREPLGVTVGIGAWNYPIQIALWKSAPALAAGNAMIFKPSEVTSLTTLKLAEIYTEAGLPNGVFNVLTGSGREVGTWLTEHPRIEKVSFTGGTTTGKKVMASASSSSLKEVTMELGGKSPLIICADADLDKAADIAMMANFYSSGQVCTNGTRVFIPAEMKAAFEAKIAERVARIRVGNPEDENTNFGPLVSFQHMESVLGYIAKGKEEGARVLCGGERLTAGDFAKGAFVAPTVFTDCTDDMTIVKEEIFGPVMSILTYETEEEVIRRANDTDYGLAAGVCTNDITRAHRIIHKLEAGICWINAWGESPAEMPVGGYKQSGVGRENGVSSLAQYTRIKSVQVELGGYNSVF

SEQ ID NO: 497 - DNA, 1464 bp, Rhizobium loti
  CDS (1)..(1464): transl_table=11
atgcgcgcccagcccacggcatcgcactatgtcaacggacgctacatcgacgacgagcaaggggcgccattgccggtcatctatccggcaaccggcgagaccatcgccatgctgcgctcggcgacgccgaatgtgctggagctcgccatcgaggccgcacgcgccgcgcaaccggcatgggcgcggctgaagccggtcgagcgcggccgcatcctgcgccgcgcagccgacattctgcgcgcccgcaacgccgacctcgcccgcatcgagacgctcgacaccggcaaggccatccaggaaacgctggtggcggacgcaccgtcggccgcggactgcctggaatacttcgggggcgcggtcgccgcctataatggcgaggccgtcgatctcggcggtcccttcgcctacacacggcgcgaggcgctcggcgtctgtgtcggcatcggcgcctggaactacccgatccagatcgccggctggaaatccgcccctgcgctggccatgggcaacgccatggtattcaagccgtcggaaaacacgccgttgtcagcgctggcgctggccgaaatctacagcgaggccggcctgcccgacgggctgttcaatgtcgtgcagggctatggcgatgttggcgcgggcctcgtcggccacgatgtcgtggcaaaagtttcggtgaccggttcggtgccgaccgggcgcaaggttctgtcgcttgcgggttcgaagatgaagcacgcgacgatggagctcggcggcaagtcgccgctgatcgtcttcgacgatgccgacatcgaaaacgccattggcggcgccatgctcggcaatttttactccacaggccagatctgctccaacggcacgcgtgtcttcgtgcaaagcggcatccacgaccgcttcgtcgagcggctggtcgagcggacgaagaaaatccgcatcggcaatccgcttgatcccgagacgcagatgggaccactggtctccaaggcacagcacgagaaggtcgtcggctatattgggattggcaagcaggacggcgctgttctcgcctgcggtggcaatgtgccgtcgctgcagggttttgacggcggcttcttcgtcgagccgacggtgttcaccggggtcaccgacacgatgcgcatcgcccgcgaggagattttcggacctgtcatgagcgtgctgaaattcgacggcgaggacgaggtgatcgaccgcgccaacgacaccgaattcggcctcgccgcgggcgtcttcacccgcgacctgccgcgcgcccaccgcgtgatcgccgaattgcaggccggcacctgctggatcaacgcctacaatctgacgccggtggaaatccccttcggcggcttcaagcagtccggcatcggccgcgagaattcgctggcggcattggcgctctattcgcagctgaagtcgatctatgtcgagactggggacgtggcgagcccgtattga

SEQ ID NO: 498 - protein, 487 aa, Rhizobium loti
MRAQPTASHYVNGRYIDDEQGAPLPVIYPATGETIAMLRSATPNVLELAIEAARAAQPAWARLKPVERGRILRRAADILRARNADLARIETLDTGKAIQETLVADAPSAADCLEYFGGAVAAYNGEAVDLGGPFAYTRREALGVCVGIGAWNYPIQIAGWKSAPALAMGNAMVFKPSENTPLSALALAEIYSEAGLPDGLFNVVQGYGDVGAGLVGHDVVAKVSVTGSVPTGRKVLSLAGSKMKHATMELGGKSPLIVFDDADIENAIGGAMLGNFYSTGQICSNGTRVFVQSGIHDRFVERLVERTKKIRIGNPLDPETQMGPLVSKAQHEKVVGYIGIGKQDGAVLACGGNVPSLQGFDGGFFVEPTVFTGVTDTMRIAREEIFGPVMSVLKFDGEDEVIDRANDTEFGLAAGVFTRDLPRAHRVIAELQAGTCWINAYNLTPVEIPFGGFKQSGIGRENSLAALALYSQLKSIYVETGDVASPY

SEQ ID NO: 499 - DNA, 1461 bp, Vibrio parahaemolyticus
  CDS (1)..(1461): transl_table=11
atggaaatgaaaacacattacatcgatggtgcaatgtatatcggatgttctgaagagcatttcaccacttacaatccggcaaatggtgagccattggccaatattaaacaagcaaaccagagcgatatggaagccgctattgaatctgcaaagcgcggctttgaggtttggtctgcaatgacggccattgaacgtagccggattcttaataaagcggtagcgattctgcgtgaacgcaatgacgagttagccgctttagaagtggcggacacgggtaagccaattcaagaagcgatcgctgttgatattacgacaggcgcagatgttatcgaatattacgctggtcttgcaccaagtttgcagggtgagcaacaaccacttaatgaaaaccagtttttctatacccgccgtgaacctttgggaatttgcgcaggtattggcgcctggaactatcctattcaaatcgcaatgtggaaatcagcaccagcactggctgcgggtaatgcaatgatctttaagccgtcggaagaaacaccgcttacagcacttaagcttgcggaaatttattctgaagcgggccttcctgatggtgtgtttaacgtcgtgcagggtgattaccgggtagggcagatgctaacggcgcatccggatattgctaaagtatcgttcactggcgaatcaggcactggcaaagttgttatgggtgacagtgcaaaaacgcttaagcaagtcacaatggagttaggtggtaagtcaccactgatcgtattcgacgatgcgaagctggacgatgcggtatcagcagcaatggttgctaacttttacactcagggtgaggtatgtaccaacggtacccgtgtatttgtccatgaatctatctacgacgactttgttgcacagcttaaaactcgtactgagaaactggttgtcggagaccctcttgatgaaaatacacaaatcggtgccctaatttcaaaagaacatgaaagcaaagtgctgtcagcgattgagagcgcaaaagcgagcggtgccactctgctgaccggcggttacaaagtaacagataatggtctgcaaaatggtaacttcgttgctccaaccgtatttatcgactgtgacgatagcatgagccacgtacagcaagagatctttggtcctgtaatgtccgtgcttaaatttagcgaagaagctgaagttatcgagcgagctaacgatacggactatggcttggctgctggtgtctttactcagaacctctctcgcgctcatcgcgtaattcataagattcaggcaggtatctgctgggttaatgcatggggtgactctccggcagaaatgccagttggtggctataagcaatccggtattggccgtgagaacggcgtcgaaacactgaagcactacacgcaaactaagagcgtactggttcagcttagcgacttcgaaagcccttacgcctaa

SEQ ID NO: 500 - protein, 486 aa, Vibrio parahaemolyticus
MEMKTHYIDGAMYIGCSEEHFTTYNPANGEPLANIKQANQSDMEAAIESAKRGFEVWSAMTAIERSRILNKAVAILRERNDELAALEVADTGKPIQEAIAVDITTGADVIEYYAGLAPSLQGEQQPLNENQFFYTRREPLGICAGIGAWNYPIQIAMWKSAPALAAGNAMIFKPSEETPLTALKLAEIYSEAGLPDGVFNVVQGDYRVGQMLTAHPDIAKVSFTGESGTGKVVMGDSAKTLKQVTMELGGKSPLIVFDDAKLDDAVSAAMVANFYTQGEVCTNGTRVFVHESIYDDFVAQLKTRTEKLVVGDPLDENTQIGALISKEHESKVLSAIESAKASGATLLTGGYKVTDNGLQNGNFVAPTVFIDCDDSMSHVQQEIFGPVMSVLKFSEEAEVIERANDTDYGLAAGVFTQNLSRAHRVIHKIQAGICWVNAWGDSPAEMPVGGYKQSGIGRENGVETLKHYTQTKSVLVQLSDFESPYA

SEQ ID NO: 501 - DNA, 1461 bp, Vibrio vulnificus
  CDS (1)..(1461): transl_table=11
atggaagttacagcacattacattggagggaagcctttcgttggtgacactggcgaatcttttgcgaccttaaatccagcaaccggagaagtgttagcacacatcgagcaagccgacgaaagggtgttaggtcacgccatcgagagcgcgaagcttggcttttctgtgtggtcatctatgagcgctgccgagcgcagccgatgcttactcaaagcggcgcagctgattcgcgatcacaatgatgaactagcagagttggaagtgcgcgatacgggcaaaccaattcaagaagcgagtgtggttgacattgctactggcgcagatgttatcgagtattttgctggattagtgaatggcttaggtggcgagcaacaatcccttggttccaatcagtttttttacaccagaagagaacctctgggcatttgtgccggcatcggcgcttggaattatccgattcaaattgcaatgtggaaagccgcgcctgcattagcagctggcaacgcgatgatctttaaaccctcagaagaaacgccactttcggcactcaaactggctgaactctttacgcaagcgggcgtgcctgatggcgtgtttaacgttgttcaaggggactatcgtgttgggcaaatgctcaccgcgcatcctgaaatcgacaaagtctcatttaccggtgagtcaggcacgggcaagaaagtgatggccgatagtgcagcgacactcaaacccgtcaccatggaattgggggggaaatcgcccttgattattttcgatgatgccgatcttgatgatgctgtctcggcagcaatggtggcaaatttttacactcaaggtgaggtgtgtacccatggcacgcgagtttatgttcaacgagcgatgtacgacgcgtttgttgaacagctaaaagagcgcacggaaaagctcattgtcggcgatccaatgaacatggaaacgcaaattggctcactgatttctaaatcgcatctagaaaaagtactcggtgctatttcgagtgcgaaagagagtggtgcaacgttgctcactggtggtttccaagtgacggaaagagggctagagaaagggtgttttgttgcgcctaccgtctttgtcgattgccgcgatgagatgcctcatgtgcaaaatgaaatctttggacctgtcatgtcggtgctggtgtttgatgacgaagatgaagtcattgctcgcgcgaacaacacccaatacggcttggccgctggggtatttacgcagaatctatccaaagcccatagagtcattcaccaactgcaagcgggcatttgctggataaacacttggggaaattcacccgcagagatgccggtggggggctacaagttgtcgggcattggccgcgaaaatggccaagagacgttactgcactatacgcagaccaaaagcgtgtttgtcgaactgggtgcgttcgactccccttacgcttaa

SEQ ID NO: 502 - protein, 486 aa, Vibrio vulnificus
MEVTAHYIGGKPFVGDTGESFATLNPATGEVLAHIEQADERVLGHAIESAKLGFSVWSSMSAAERSRCLLKAAQLIRDHNDELAELEVRDTGKPIQEASVVDIATGADVIEYFAGLVNGLGGEQQSLGSNQFFYTRREPLGICAGIGAWNYPIQIAMWKAAPALAAGNAMIFKPSEETPLSALKLAELFTQAGVPDGVFNVVQGDYRVGQMLTAHPEIDKVSFTGESGTGKKVMADSAATLKPVTMELGGKSPLIIFDDADLDDAVSAAMVANFYTQGEVCTHGTRVYVQRAMYDAFVEQLKERTEKLIVGDPMNMETQIGSLISKSHLEKVLGAISSAKESGATLLTGGFQVTERGLEKGCFVAPTVFVDCRDEMPHVQNEIFGPVMSVLVFDDEDEVIARANNTQYGLAAGVFTQNLSKAHRVIHQLQAGICWINTWGNSPAEMPVGGYKLSGIGRENGQETLLHYTQTKSVFVELGAFDSPYA

SEQ ID NO: 503 - DNA, 1461 bp, Vibrio vulnificus
  CDS (1)..(1461): transl_table=11
atggaagttacagcacattacattggagggaagcctttcgttggtgacactggcgaatcttttgcgaccttaaatccagcaaccggagaagtgttagcacacatcgagcaagccgacgaaagggtgttagctcacgccatcgagagcgcgaagcttggcttttctgtgtggtcatctatgagcgctgccgagcgcagccgatgcttactcaaagcggcgcagctgattcgcgatcacaatgatgaactagcagagttggaagtgcgcgatacgggcaaaccaattcaagaagcgagtgtggttgacattgctactggcgcagatgttatcgagtattttgctggattagtgaatggcttaggtggcgagcaacaatcccttggttccaatcagtttttttacaccagaagagaacctctgggcatttgtgccggcatcggcgcttggaattatccgattcaaattgcaatgtggaaagccgcgcctgcattagcagctggcaacgcgatgatctttaaaccctcagaagaaacgccactttcggcactcaaactggctgaactctttacgcaagcgggcgtgcctgatggcgtgtttaacgttgttcaaggggactatcgtgttgggcaaatgctcaccgcgcatcctgaaatcgccaaagtctcatttactggtgagtcaggcaccggcaagaaagtgatggccgatagtgcagcgacactcaaacccgtcaccatggaattgggggggaaatcgcccttgattattttcgatgatgccgatcttgatgatgctgtctcggcagcaatggtggcaaatttttacactcaaggtgaggtgtgtacccatggcacgcgagtttatgttcaacgagcgatgtacgacgcgtttgttgaacagctaaaagagcgcacggaaaagctcattgtcggcgatccaatgaacatggaaacgcaaattggctcactgatttctaaatcgcatctagaaaaagtactcggtgctatttcgagtgcgaaagagagcggtgcaacgttgctcactggtggtttccaagtgacggaaagagggctagagaaagggtgttttgttgcgcctaccgtctttgtcgattgtcgcgatgagatgcctcatgtgcaaaatgaaatctttggacctgtcatgtcagtgctggtgtttgatgacgaagatgaagtcattgctcgcgcgaataacacccaatacggcttggctgctggggtatttacgcaaaatctatccaaagcccatagagtcattcaccaactgcaagcgggcatctgctggataaacacttggggaaattcacccgcagagatgccggtaggtggctacaagctgtcgggcattggtcgcgaaaatggccaagagacgttactgcactatacgcagaccaaaagcgtgtttgtcgaactgggtgcgttcgactccccttacgcttaa

SEQ ID NO: 504 - protein, 486 aa, Vibrio vulnificus
MEVTAHYIGGKPFVGDTGESFATLNPATGEVLAHIEQADERVLAHAIESAKLGFSVWSSMSAAERSRCLLKAAQLIRDHNDELAELEVRDTGKPIQEASVVDIATGADVIEYFAGLVNGLGGEQQSLGSNQFFYTRREPLGICAGIGAWNYPIQIAMWKAAPALAAGNAMIFKPSEETPLSALKLAELFTQAGVPDGVFNVVQGDYRVGQMLTAHPEIAKVSFTGESGTGKKVMADSAATLKPVTMELGGKSPLIIFDDADLDDAVSAAMVANFYTQGEVCTHGTRVYVQRAMYDAFVEQLKERTEKLIVGDPMNMETQIGSLISKSHLEKVLGAISSAKESGATLLTGGFQVTERGLEKGCFVAPTVFVDCRDEMPHVQNEIFGPVMSVLVFDDEDEVIARANNTQYGLAAGVFTQNLSKAHRVIHQLQAGICWINTWGNSPAEMPVGGYKLSGIGRENGQETLLHYTQTKSVFVELGAFDSPYA

SEQ ID NO: 505 - DNA, 1473 bp, Yersinia pestis
  CDS (1)..(1473): transl_table=11
atgtcccgctacggcttgcaaaaactttatatcaacggcgcgtacaccgacagcaccagtggtgatactttcgatgccgtgaaccccgcgaatggcgaatgcattgcacaactccaggccgccaacgcacaggatgttgataaggcggtagccgccgccaaacaaggtcagcctgtgtgggcagcgatgaccgcgatggaacgttcacgcatcttgcgccgggccgtggatatcttgcgtgatcgtaatgatgaactggcggcaattgaaacggcagacaccggtaaacccctatccgaaacccgatctgtggacatcgttaccggtgccgatgtgctggaatattatgctggcctaatccccgcccttgaagggcaacagatcccactacgtggcagcgcatttgtctatacccgccgtgagccactgggcgtggttgccggtattggtgcctggaactatccccttcagatcgctttgtggaaatctgcaccggcgctggcggcgggcaacgctatgatcttcaaaccaagtgaagtgacatcgctgaccgcactgaaattggcgggaatctacaccgaagcgggtttaccggctggcgtatttaacgtattgaccggcagtggtgaccaggttgggcagatgctgacagagcatccgggtattgcaaaggtctccttcaccggggggattgccagcggtaaaaaggtgatggctaacgccgcgggatcgaccctgaaagatgtcaccatggagttgggcggaaagtccccactaattatttttgctgatgccgatctcgataaggccgctgatattgcgatgatggccaatttctacagctcaggacaagtctgcaccaacggcacgcgagtttttgtcccgcaggcgttacaggccgcgtttgagcagaaaatcgttgaacgggtcaagcggattcatattggtgacccaagcgatgaacgaaccaactttggcccgttggttagcttccagcaccgcgattcagtgatgcgttacattgacagcggtaaacgggaaggcgcaaccctgctgatcgggggatacagtctgaccgagggcgcactggcacacggggcctatgtcgcccctacggtattcacccactgccgtgatgacatgcaaattgtgcgtgaagagatcttcggaccggtgatgagcattcttagttatcaaagcgaagaggaagtcattcgccgcgccaatgataccgagtacggtttagcggcgggggtcgttacacaggatttgaaccgtgcccatcgcgtgattcatcaactgcaagcgggtatctgctggatcaatacttggggcgaatcggcaccagagatgcctgtaggcggatataagcattctggtgtaggccgtgaaaacggtatcagcacgctggaacattacacgcaaatcaaatcaattcaggttgagttaggcagcttcaattctgttttttaa

SEQ ID NO: 506 - protein, 490 aa, Yersinia pestis
MSRYGLQKLYINGAYTDSTSGDTFDAVNPANGECIAQLQAANAQDVDKAVAAAKQGQPVWAAMTAMERSRILRRAVDILRDRNDELAAIETADTGKPLSETRSVDIVTGADVLEYYAGLIPALEGQQIPLRGSAFVYTRREPLGVVAGIGAWNYPLQIALWKSAPALAAGNAMIFKPSEVTSLTALKLAGIYTEAGLPAGVFNVLTGSGDQVGQMLTEHPGIAKVSFTGGIASGKKVMANAAGSTLKDVTMELGGKSPLIIFADADLDKAADIAMMANFYSSGQVCTNGTRVFVPQALQAAFEQKIVERVKRIHIGDPSDERTNFGPLVSFQHRDSVMRYIDSGKREGATLLIGGYSLTEGALAHGAYVAPTVFTHCRDDMQIVREEIFGPVMSILSYQSEEEVIRRANDTEYGLAAGVVTQDLNRAHRVIHQLQAGICWINTWGESAPEMPVGGYKHSGVGRENGISTLEHYTQIKSIQVELGSFNSVF

SEQ ID NO: 507 - DNA, 1473 bp, Yersinia pseudotuberculosis
  CDS (1)..(1473): transl_table=11
atgtcccgctacggcttgcaaaaactttatatcaacggcgcgtacaccgacagcaccagtggtgatactttcgatgccgtgaaccccgcgaatggcgaatgcattgcacaactccaggccgccaacgcacaggatgttgataaggcggtagccgccgccaaacaaggtcagcctgtgtgggcagcgatgaccgcgatggaacgttcacgcatcttgcgccgggccgtggatatcttgcgtgatcgtaatgatgaactggcggcaattgaaacggcagacaccggtaaacccctatccgaaacccgatctgtggacatcgttaccggtgccgatgtgctggaatattatgctggcctaatccccgcccttgaagggcaacagatcccactacgtggcagcgcatttgtctatacccgccgtgagccactgggcgtggttgccggtattggtgcctggaactatccccttcagatcgctttgtggaaatctgcaccggcgctggcggcgggcaacgctatgatcttcaaaccaagtgaagtgacatcgctgaccgcactgaaattggcgggaatctacaccgaagcgggtttaccggctggcgtatttaacgtattgaccggcagtggtgaccaggttgggcagatgctgacagagcatccgggtattgcaaaggtctccttcaccggggggattgccagcggtaaaaaggtgatggctaacgccgcgggatcgaccctgaaagatgtcaccatggagttgggcggaaagtccccactaattatttttgctgatgccgatctcgataaggccgctgatattgcgatgatggccaatttctacagctcaggacaagtctgcaccaacggcacgcgagtttttgtcccgctggcgttacaggccgcgtttgagcagaaaatcgttgaacgggtcaagcggattcatattggtgacccaagcgatgaacgaaccaactttggcccgttggttagcttccagcaccgcgattcagtgatgcgttacattgacagcggtaaacgggaaggcgcaaccctgctgatcgggggatacagtctgaccgagggcgcactggcacacggggcctatgtcgcccctacggtattcacccactgccgtgatgacatgcaaattgtgcgtgaagagatcttcggaccggtgatgagcattctgagttatcaaagcgaagaggaagtcattcgccgcgccaatgataccgagtacggtttagcggcgggggtcgttacacaggatttgaaccgtgcccatcgcgtgattcatcaactgcaagcgggtatctgctggatcaatacttggggcgaatcggcaccagagatgcctgtaggcggatataagcattctggtgtaggccgtgaaaacggtatcagcacgctggaacattacacgcaaatcaaatcaattcaggttgagttaagcagcttcaattctgttttttaa

SEQ ID NO: 508 - protein, 490 aa, Yersinia pseudotuberculosis
MSRYGLQKLYINGAYTDSTSGDTFDAVNPANGECIAQLQAANAQDVDKAVAAAKQGQPVWAAMTAMERSRILRRAVDILRDRNDELAAIETADTGKPLSETRSVDIVTGADVLEYYAGLIPALEGQQIPLRGSAFVYTRREPLGVVAGIGAWNYPLQIALWKSAPALAAGNAMIFKPSEVTSLTALKLAGIYTEAGLPAGVFNVLTGSGDQVGQMLTEHPGIAKVSFTGGIASGKKVMANAAGSTLKDVTMELGGKSPLIIFADADLDKAADIAMMANFYSSGQVCTNGTRVFVPLALQAAFEQKIVERVKRIHIGDPSDERTNFGPLVSFQHRDSVMRYIDSGKREGATLLIGGYSLTEGALAHGAYVAPTVFTHCRDDMQIVREEIFGPVMSILSYQSEEEVIRRANDTEYGLAAGVVTQDLNRAHRVIHQLQAGICWINTWGESAPEMPVGGYKHSGVGRENGISTLEHYTQIKSIQVELSSFNSVF

SEQ ID NO: 509 - DNA, 2263 bp, Saccharomyces cerevisiae
  CDS (466)..(1959)
tgaactgaatctttttttccggctgtcctcttacagttgagttacaatattttgccagaaatatttacatttttttacccaatctctataataattattttaattcctaatccgcttcaggcccgcggtcgttgaagtgctatagtttatattcagtacattgtctttaatctctcagtattattttatcaatagtaaatacttcaagtccatcgcacggcgtggtggtgataaagggaaaatgcgcgcgggattagcaaaggcggccaatggattaagggtgacaagatagcaccacatcacatcacatcaccatcagtaatggagaggaaatagggtataaatactcgtcagagatcaatagatattatttcgcaacgtcctttattgttctgttcttatttgatcaattaagctagaaaaccagctacattaaaagcaaattttacaaactactatttcaacatgactttgagtaagtattctaaaccaactctaaacgaccctaatttattcagagaatctggttatattgacggaaaatgggttaagggcactgacgaagtttttgaggtggtagaccctgcttccggcgaaatcatagcaagagttcccgaacaaccagtctccgtggttgaggaagcgattgatgttgcctatgaaactttcaagacgtacaagaatacaacaccaagagagagggcaaagtggctcagaaacatgtataacttaatgcttgaaaatttggatgatctggcaaccatcattactttagaaaatggtaaagctctaggggaagctaaaggagaaatcaaatacgcggcttcgtattttgagtggtacgccgaggaagcaccccgtttatatggtgctactattcaacccttgaaccctcacaacagagtattcacaattaggcaacctgttggtgtatgcggtataatttgtccatggaattttccgagcgccatgatcacgagaaaggccgccgctgctttagctgtgggctgcacagtagtcatcaagccagactctcaaacgccgctatctgctttagcaatggcatatttggctgaaaaggcaggctttcccaagggttcgtttaatgttattctttcacatgccaacacaccaaagcttggtaaaacattatgtgaatcaccaaaagtcaagaaagttacttttactggttctacaaacgtcggtaaaatcttgatgaaacaatcttcttctactttgaagaaactgtcttttgagctgggtggtaacgcccctttcatagtctttgaggatgccgatttggatcaagccttggaacaagccatggcttgtaaatttaggggtttgggtcaaacatgtgtgtgcgcaaatagactttacgttcactcatccataattgataaatttgcgaaattactcgcggagagggtcaaaaaattcgtaattggccatggtttggacccaaaaactacacatggttgtgtcattaactccagcgctattgaaaaagttgaaagacataaacaggatgccattgataagggagcaaaagttgtgcttgaaggtggacgtttaactgagttaggtcctaacttttatgctccagtaattttgtcacacgttccctcaacagctattgtttccaaggaggagacttttggtccattatgtccaatcttttcttttgatactatggaagaagttgtcggatatgctaatgatactgagtttggtttagcagcatatgtcttttctaaaaatgtcaacactttatacactgtgtctgaagctttggaaactggtatggtttcatgtaatacaggtgttttttcggattgttctataccatttggtggtgttaaagagtcaggatttggaagagaaggttcgctatatggtattgaagattacactgttttgaagaccatcacaattgggaatttgccaaacagcatttaaagcaatagtaatcgtggacgatacttagaattgaatatgattctttgtaatgattgtatatatctattgcatgtataaatactctactcctcgtatatagaaagttaagtaaatttttgaaagaaaagagttcatatatttacggagttttgaagtttttcacaagcggaataagtgataccattcataaaatatcatatctatctatctatctatttttgtgagatatatggtacgaaaataaatgcctttccttttaagcctttctgtaagcttttatgtatacaacgtttctttatcttta

SEQ ID NO: 510 - protein, 497 aa, Saccharomyces cerevisiae
MTLSKYSKPTLNDPNLFRESGYIDGKWVKGTDEVFEVVDPASGEIIARVPEQPVSVVEEAIDVAYETFKTYKNTTPRERAKWLRNMYNLMLENLDDLATIITLENGKALGEAKGEIKYAASYFEWYAEEAPRLYGATIQPLNPHNRVFTIRQPVGVCGIICPWNFPSAMITRKAAAALAVGCTVVIKPDSQTPLSALAMAYLAEKAGFPKGSFNVILSHANTPKLGKTLCESPKVKKVTFTGSTNVGKILMKQSSSTLKKLSFELGGNAPFIVFEDADLDQALEQAMACKFRGLGQTCVCANRLYVHSSIIDKFAKLLAERVKKFVIGHGLDPKTTHGCVINSSAIEKVERHKQDAIDKGAKVVLEGGRLTELGPNFYAPVILSHVPSTAIVSKEETFGPLCPIFSFDTMEEVVGYANDTEFGLAAYVFSKNVNTLYTVSEALETGMVSCNTGVFSDCSIPFGGVKESGFGREGSLYGIEDYTVLKTITIGNLPNSI

SEQ ID NO: 511 - DNA, 1512 bp, Schizosaccharomyces pombe
  CDS (1)..(1512)
atgtctacaaaactcgttgatcacgtcgaaattaccgttcctacaggaaaaacttacattcaacctgtcggtctctttatcaataaccaacatgtcgattccgttcacggtggtcgtgtgaaggtttactctccttctactgagaaacttatttgtgaggtagctgacgccgacgaagaggatgtcgatatcgccgtgaaagttgctcgtgccgctttccagaccgatgctccatggcgcaagttttccagcgctcaacgtggacgttgcctctcccgtctcgctgactgtatcgagcaaaacttggaatacctcgcttctattgagactcttgacaatggtaagagtatcactttggctagaggtgacgttcaagctgctgccgattgtttccgttattatggtggttgggccgataaggattatggtcaaaccattgaaaccgacattaagcgttttgcctatactcgtcacgaacccattggtgtatgtggtcaaatcatcccctggaatttccctttcttgatgtgcgcttggaaaattgctcctgccgtcgcttgtggtaatactattattttgaagactgccgaactcactcctctttccgctctgtgtcttaccaagtttgttcctgaatgtggcttccctccaggtgtcatcaatgttctcagcggtgatggtcgccgttgtggtaacgctattagttctcacatggacattgataaggtggcctttaccggttctaccggtgtcggtcgtatggttatgcgtgctgccgcctcctccaacctgaagaaggtcactcttgaattgggtggtaagtctcccaatattgttttcaacgatgccgatttggactcagctgctgtctggactaactatggtatcttttacaactctggtcaagtctgttgtgcaggtagccgtgtctacgtgcaagaggatgtttacgatgagttcattaaacgcatggttgccaaggccaagactttgaaggttggtgatcctttcgccgaagataccttccaaggtgctcaagttagtaagcaacagtatgaacgtattgttagttatattgagagtggcattgctcatggtgccaaattagagattggtggtaagcgtcatggtaatctcggttactttgtcgaacctactattctctccaacgttaccgaggacatggctgtcggtaaggaggaaatttttggacccgttcttgccgtcattaaattcaagaccatcgaggaggccatccgtcgcggtaacaacagtacatatggtttagctgctggtgtacacactaacaatattaccaatgccatcaaggtcagcaatgctcttgaagccggtactgtttgggtgaattgttataacttacttcatcaccaaattccctttggtggttataaggagagtggcatcggtcgcgaattgggctcttacggtcttaccaattatactcaaacaaaagctgttcacatcaacctgggaatggattctcccatttaa

SEQ ID NO: 512 - protein, 503 aa, Schizosaccharomyces pombe
MSTKLVDHVEITVPTGKTYIQPVGLFINNQHVDSVHGGRVKVYSPSTEKLICEVADADEEDVDIAVKVARAAFQTDAPWRKFSSAQRGRCLSRLADCIEQNLEYLASIETLDNGKSITLARGDVQAAADCFRYYGGWADKDYGQTIETDIKRFAYTRHEPIGVCGQIIPWNFPFLMCAWKIAPAVACGNTIILKTAELTPLSALCLTKFVPECGFPPGVINVLSGDGRRCGNAISSHMDIDKVAFTGSTGVGRMVMRAAASSNLKKVTLELGGKSPNIVFNDADLDSAAVWTNYGIFYNSGQVCCAGSRVYVQEDVYDEFIKRMVAKAKTLKVGDPFAEDTFQGAQVSKQQYERIVSYIESGIAHGAKLEIGGKRHGNLGYFVEPTILSNVTEDMAVGKEEIFGPVLAVIKFKTIEEAIRRGNNSTYGLAAGVHTNNITNAIKVSNALEAGTVWVNCYNLLHHQIPFGGYKESGIGRELGSYGLTNYTQTKAVHINLGMDSPI

SEQ ID NO: 513 - DNA, 1752 bp, Oryza sativa
  CDS (1)..(1752)
atggcggcaaggagggctgcttcctccctcctctctcgcggcctcatcgcgaggccttctgctgcctcctccactggcgactccgctatccttggagcaggctcagcacggggcttcttgcctggatcacttcacagattcagcgctgcaccggccgccgctgccaccgccgcagccactgaggagccgatccagccgccggtggacgtgaagtacaccaagctcctcatcaatggcaacttcgtcgatgcagcatctgggaagacgttcgcgacggtggatccccgcaccggcgatgtcattgcccgcgtggccgagggcgacgcggaggacgtcaaccgcgccgtcgccgccgcccgccgggccttcgacgagggcccgtggccgcggatgaccgcctacgagcggtgcagggtgttgctgcggttcgcggacctgatcgagcagcacgccgatgagatcgcggcgctggagacgtgggacggcgggaagacgctggagcagacgacggggacggaggtgccgatggtggcgcggtacatgcggtactacggcgggtgggcggacaagatccacggcctcgtcgtgccggcggatgggccacaccacgtgcaggtgctacacgagcccatcggcgtggccgggcagatcatcccctggaacttcccgctgctcatgttcgcctggaaggtcggcccggcgctcgcctgcggcaacgccgtcgtgctcaagaccgccgagcagacgccgctctccgcgctcttcgtcgccagcctgctccacgaggctggcctccccgacggcgttctcaacgtcgtctccggctttggtccgaccgccggcgccgctctctccagccacatgggtgtcgacaagcttgcattcaccggttcgacgggcacgggcaagatcgtgcttgagctggccgcaaggagcaaccttaagccggtgacgctggagctcggaggcaaatcacctttcatcgtcatggatgacgccgatgtcgaccaggccgtcgagcttgcgcaccgcgcgctcttcttcaaccaggggcaatgctgctgcgcggggtcacgcacgttcgtgcacgagcgcgtctacgacgagttcgtggagaaggccagggctcgcgctctgcagcgtgtggtcggcgacccattcaggacaggcgtcgagcaggggcctcagatcgacggcgagcaattcaagaagatcttgcagtacgtcaagtcgggcgtggacagtggcgccacactcgtggccggcggcgacagggcgggcagcagggggttctacatccagccaaccgtctttgcagacgtcgaggacgaaatgaagatcgcgcaggaggagatattcgggccggtgcagtccatcctcaagttcaggtttgcaacactagaattcccccgaattccatctgaccgtgacagattatcaactggaatttatacaaacaccttacgtgcaatgtgcagcacggtggaggaggtggtgcggagggcgaacgcgacgccatacgggctggcggcgggggtgttcacccagaggctggacgcggcgaacaccctggcgcgggcattgagggtcgggacggtgtgggtgaacacctacgacgtgttcgacgcggccgtcccgttcggcggctacaagatgagcggcgttggcagggagaagggcgtctacagcctccgcaactacctccagaccaaggccgtcgtcacgcccatcaaggacgccgcctggttgtag

SEQ ID NO: 514 - protein, 583 aa, Oryza sativa
MAARRAASSLLSRGLIARPSAASSTGDSAILGAGSARGFLPGSLHRFSAAPAAAATAAATEEPIQPPVDVKYTKLLINGNFVDAASGKTFATVDPRTGDVIARVAEGDAEDVNRAVAAARRAFDEGPWPRMTAYERCRVLLRFADLIEQHADEIAALETWDGGKTLEQTTGTEVPMVARYMRYYGGWADKIHGLVVPADGPHHVQVLHEPIGVAGQIIPWNFPLLMFAWKVGPALACGNAVVLKTAEQTPLSALFVASLLHEAGLPDGVLNVVSGFGPTAGAALSSHMGVDKLAFTGSTGTGKIVLELAARSNLKPVTLELGGKSPFIVMDDADVDQAVELAHRALFFNQGQCCCAGSRTFVHERVYDEFVEKARARALQRVVGDPFRTGVEQGPQIDGEQFKKILQYVKSGVDSGATLVAGGDRAGSRGFYIQPTVFADVEDEMKIAQEEIFGPVQSILKFRFATLEFPRIPSDRDRLSTGIYTNTLRAMCSTVEEVVRRANATPYGLAAGVFTQRLDAANTLARALRVGTVWVNTYDVFDAAVPFGGYKMSGVGREKGVYSLRNYLQTKAVVTPIKDAAWL

SEQ ID NO: 515 - DNA, 1686 bp, Oryza sativa
  CDS (1)..(1686)
atggcggcaaggagggctgcttcctccctcctctctcgcggcctcatcgcgaggccttctgctgcctcctccactggcgactccgctatccttggagcaggctcagcacggggcttcttgcctggatcacttcacagattcagcgctgcaccggccgccgctgccaccgccgcagccactgaggagccgatccagccgccggtggacgtgaagtacaccaagctcctcatcaatggcaacttcgtcgatgcagcatctgggaagacgttcgcgacggtggatccccgcaccggcgatgtcattgcccgcgtggccgagggcgacgcggaggacgtcaaccgcgccgtcgccgccgcccgccgggccttcgacgagggcccgtggccgcggatgaccgcctacgagtttgcgcgtgtgtgcatgcaggagcggtgcagggtgttgctgcggttcgcggacctgatcgagcagcacgccgatgagatcgcggcgctggagacgtgggacggcgggaagacgctggagcagacgacggggacggaggtgccgatggtggcgcggtacatgcggtactacggcgggtgggcggacaagatccacggcctcgtcgtgccggcggatgggccacaccacgtgcaggtgctacacgagcccatcggcgtggccgggcagatcatcccctggaacttcccgctgctcatgttcgcctggaaggtcggcccggcgctcgcctgcggcaacgccgtcgtgctcaagaccgccgagcagacgccgctctccgcgctcttcgtcgccagcctgctccacgaggctggcctccccgacggcgttctcaacgtcgtctccggctttggtccgaccgccggcgccgctctctccagccacatgggtgtcgacaagcttgcattcaccggttcgacgggcacgggcaagatcgtgcttgagctggccgcaaggagcaaccttaagccggtgacgctggagctcggaggcaaatcacctttcatcgtcatggatgacgccgatgtcgaccaggccgtcgagcttgcgcaccgcgcgctcttcttcaaccaggggcaatgctgctgcgcggggtcacgcacgttcgtgcacgagcgcgtctacgacgagttcgtggagaaggccagggctcgcgctctgcagcgtgtggtcggcgacccattcaggacaggcgtcgagcaggggcctcagatcgacggcgagcaattcaagaagatcttgcagtacgtcaagtcgggcgtggacagtggcgccacactcgtggccggcggcgacagggcgggcagcagggggttctacatccagccaaccgtctttgcagacgtcgaggacgaaatgaagatcgcgcaggaggagatattcgggccggtgcagtccatcctcaagttcagcacggtggaggaggtggtgcggagggcgaacgcgacgccatacgggctggcggcgggggtgttcacccagaggctggacgcggcgaacaccctggcgcgggcattgagggtcgggacggtgtgggtgaacacctacgacgtgttcgacgcggccgtcccgttcggcggctacaagatgagcggcgttggcagggagaagggcgtctacagcctccgcaactacctccagaccaaggccgtcgtcacgcccatcaaggacgccgcctggttgtag

SEQ ID NO: 516 - protein, 561 aa, Oryza sativa
MAARRAASSLLSRGLIARPSAASSTGDSAILGAGSARGFLPGSLHRFSAAPAAAATAAATEEPIQPPVDVKYTKLLINGNFVDAASGKTFATVDPRTGDVIARVAEGDAEDVNRAVAAARRAFDEGPWPRMTAYEFARVCMQERCRVLLRFADLIEQHADEIAALETWDGGKTLEQTTGTEVPMVARYMRYYGGWADKIHGLVVPADGPHHVQVLHEPIGVAGQIIPWNFPLLMFAWKVGPALACGNAVVLKTAEQTPLSALFVASLLHEAGLPDGVLNVVSGFGPTAGAALSSHMGVDKLAFTGSTGTGKIVLELAARSNLKPVTLELGGKSPFIVMDDADVDQAVELAHRALFFNQGQCCCAGSRTFVHERVYDEFVEKARARALQRVVGDPFRTGVEQGPQIDGEQFKKILQYVKSGVDSGATLVAGGDRAGSRGFYIQPTVFADVEDEMKIAQEEIFGPVQSILKFSTVEEVVRRANATPYGLAAGVFTQRLDAANTLARALRVGTVWVNTYDVFDAAVPFGGYKMSGVGREKGVYSLRNYLQTKAVVTPIKDAAWL

SEQ ID NO: 517 - DNA, 1533 bp, Oryza sativa
  CDS (1)..(1533)
atggcggcaaggagggctgcttcctccctcctctctcgcggcctcatcgcgaggccttctgctgcctcctccactggcgactccgctatccttggagcaggctcagcacggggcttcttgcctggatcacttcacagattcagcgctgcaccggccgccgctgccaccgccgcagccactgaggagccgatccagccgccggtggacgtgaagtacaccaagctcctcatcaatggcaacttcgtcgatgcagcatctgggaagacgttcgcgacggtggatccccgcaccggcgatgtcattgcccgcgtggccgagggcgacgcggaggacgtcaaccgcgccgtcgccgccgcccgccgggccttcgacgagggcccgtggccgcggatgaccgcctacgagcggtgcagggtgttgctgcggttcgcggacctgatcgagcagcacgccgatgagatcgcggcgctggagacgtgggacggcgggaagacgctggagcagacgacggggacggaggtgccgatggtggcgcggtacatgcggtactacggcgggtgggcggacaagatccacggcctcgtcgtgccggcggatgggccacaccacgtgcaggtgctacacgagcccatcggcgtggccgggcagatcatcccctggaacttcccgctgctcatgttcgcctggaaggtcggcccggcgctcgcctgcggcaacgccgtcgtgctcaagaccgccgagcagacgccgctctccgcgctcttcgtcgccagcctgctccacgaggctggcctccccgacggcgttctcaacgtcgtctccggctttggtccgaccgccggcgccgctctctccagccacatgggtgtcgacaagcttgcattcaccggttcgacgggcacgggcaagatcgtgcttgagctggccgcaaggagcaaccttaagccggtgacgctggagctcggaggcaaatcacctttcatcgtcatggatgacgccgatgtcgaccaggccgtcgagcttgcgcaccgcgcgctcttcttcaaccaggggcctcagatcgacggcgagcaattcaagaagatcttgcagtacgtcaagtcgggcgtggacagtggcgccacactcgtggccggcggcgacagggcgggcagcagggggttctacatccagccaaccgtctttgcagacgtcgaggacgaaatgaagatcgcgcaggaggagatattcgggccggtgcagtccatcctcaagttcagcacggtggaggaggtggtgcggagggcgaacgcgacgccatacgggctggcggcgggggtgttcacccagaggctggacgcggcgaacaccctggcgcgggcattgagggtcgggacggtgtgggtgaacacctacgacgtgttcgacgcggccgtcccgttcggcggctacaagatgagcggcgttggcagggagaagggcgtctacagcctccgcaactacctccagaccaaggccgtcgtcacgcccatcaaggacgccgcctggttgtag

SEQ ID NO: 518 - protein, 510 aa, Oryza sativa
MAARRAASSLLSRGLIARPSAASSTGDSAILGAGSARGFLPGSLHRFSAAPAAAATAAATEEPIQPPVDVKYTKLLINGNFVDAASGKTFATVDPRTGDVIARVAEGDAEDVNRAVAAARRAFDEGPWPRMTAYERCRVLLRFADLIEQHADEIAALETWDGGKTLEQTTGTEVPMVARYMRYYGGWADKIHGLVVPADGPHHVQVLHEPIGVAGQIIPWNFPLLMFAWKVGPALACGNAVVLKTAEQTPLSALFVASLLHEAGLPDGVLNVVSGFGPTAGAALSSHMGVDKLAFTGSTGTGKIVLELAARSNLKPVTLELGGKSPFIVMDDADVDQAVELAHRALFFNQGPQIDGEQFKKILQYVKSGVDSGATLVAGGDRAGSRGFYIQPTVFADVEDEMKIAQEEIFGPVQSILKFSTVEEVVRRANATPYGLAAGVFTQRLDAANTLARALRVGTVWVNTYDVFDAAVPFGGYKMSGVGREKGVYSLRNYLQTKAVVTPIKDAAWL

SEQ ID NO: 519 - DNA, 1512 bp, Brassica napus
  CDS (1)..(1512)
atggcgattacggtgccgcgacggcagctcttcatcggcggtcaatggacagagccccttcgccgtcaaacactccctgttgtcaatcccgccacggaggacatcatcggttacatcccagctgcaacttctgaggatgtggagctcgcggtggaagctgctaggaaagcacttacaagaaaccaaggaaaggattggtctaaagcatccggggctgttcgtgccagatacttacgtgctattgcagctaaggtaacggagaggaagtctgagctagctaatcttgaggctattgactgcggtaaacctctagatgaagcagcatgggacatggatgatgttgctggatgttttgaatattatgctgacctagctcaaggcttagattcaaagcagaaggctcctctttctcttcccttagatacttttaagggctacgttctcaaggaacccattggtgtagttggcctgattactccatggaattatccgttactgatggctgtttggaaagtcgctcctgcacttgccgctgggtgcacggcaatactgaaaccttctgagttggcctccgtgacatgtttggagctcgctgatatctgccgcgaggtgggtctgccacctggtgttcttaatattctgactggtttaggaactgaagcaggtgctccattggcatcgcatccacacgttgacaagattgttttcactggaagcacggcaactggaagcaacattatgacttctgctgccaaattggttaaacctgtttccttggagcttggtgggaaaagccctatcattgtctttgatgatgtcaaaattgacaaagctgtggaatggactatgtttggttgtttctggacaaacggtcagatttgcagtgcgacatctcgacttctcgtgcatgaaaagattgctgacgaatttttggacaagttggtaaagtggacaaagaacattaagatttcagatccttttgaagaaggctgtaggcttggtcctgttgtcagcaaaggacagtacgagagagtagtgaagtttgtctcaaacgctaggaaggaaggtgcaactgtcctctgcggaggagctcgtcctgggcatttaaaaaagggttattttgttgaacctgctataatttcaaatgtgactacttcaatggaaatctggagagatgaagtatttggtcctgttctctgtgtcaaaacattctccactgaggatgaggcaatacagctggcaaatgactcccaatatggattagcaggcgctgtattatcaaatgatctggagaggtgtgatcgcgttagtaaggcattcgaggcgggtattgtgtgggtcaactgttctcagccatgtttctgtcaagctccatggggtggaaccaaacgcagtggttttggccgtgaactaggagaatggggacttgagaactacttgagtgtgaagcaggtgacgcaatatatatctaatgaaccatggggatggtacaaacctccttccaagctttaa

SEQ ID NO: 520 - protein, 503 aa, Brassica napus
MAITVPRRQLFIGGQWTEPLRRQTLPVVNPATEDIIGYIPAATSEDVELAVEAARKALTRNQGKDWSKASGAVRARYLRAIAAKVTERKSELANLEAIDCGKPLDEAAWDMDDVAGCFEYYADLAQGLDSKQKAPLSLPLDTFKGYVLKEPIGVVGLITPWNYPLLMAVWKVAPALAAGCTAILKPSELASVTCLELADICREVGLPPGVLNILTGLGTEAGAPLASHPHVDKIVFTGSTATGSNIMTSAAKLVKPVSLELGGKSPIIVFDDVKIDKAVEWTMFGCFWTNGQICSATSRLLVHEKIADEFLDKLVKWTKNIKISDPFEEGCRLGPVVSKGQYERVVKFVSNARKEGATVLCGGARPGHLKKGYFVEPAIISNVTTSMEIWRDEVFGPVLCVKTFSTEDEAIQLANDSQYGLAGAVLSNDLERCDRVSKAFEAGIVWVNCSQPCFCQAPWGGTKRSGFGRELGEWGLENYLSVKQVTQYISNEPWGWYKPPSKL

SEQ ID NO: 521 - DNA, 1509 bp, Brassica napus
  CDS (1)..(1509)
atggcgattcctcctgtgcctactcgccagctcttcatcgacggcgaatggagagagccaatcttgaagaatcgcatccccattgtcaatccatcaacccaagatgtcattggtcatatccccgcggctacaaaggaggatgtggaggttgcagtcaacgctgctcgaagggctttctcaaggaacaaaggtaaagattgggccaaagcaccaggagatcttcgtgctaagtatctacgcgctattgctgctaaggtgactgagaggaagtcgcatctggcgacgcttgagtcgcttgatagtggtaaaccattggatgagacagtctgggatatggaggatgttgctgggtgttttgagttttatgctgaccttgctgaaggcttagatgctaagcagaaagcgcctgtttctcttcccatggagagttttaagagttatgttctcaagcaacctattggagttgtgggactcatcacaccttggaattacccccttctgatggctgtttggaaggtggctccctcacttgctgcaggatgtactgcggttctaaaaccatcagagttggcttcagtcacttgtttggagcttgctgatatctgtcgggaagttggtcttcctcctggtgtcctcaacgttcttactggatatggttctgaagctggtgctcctttggcagcacatcctagtgtggacaagattgcttttaccggaagctttgccacgggaagcaaggtcatgacagctgctgctcagttggtgaagcctgtttccatggaattgggtgggaagagccctctcattgtgtttgatgacgttgatcttgataaagctgctgaatgggctctcttcggttgcttctggacaaatggtcagatctgcagtgcaacttcccgccttcttgttcatgaaaacatcgcatctgaattcatagaaaagcttgtaaaatggagcaagaacattaaagtttctgaccccttggaagaaggatgcaggcttggtcctgttgtcagcgaaggacagtacgagaaaatcttgaagtttatctcatcggctaaaagtgaaggggcaacgattttacatggtggttcacgaccggagcatctgaaaaagggcttcttcattgaaccaaccatcataactgatgtaaccacttcaatgcaaatttggagagaagaagtttttgggcctgttctttgcattaaaacattctccagtgaggatgaggcaattgagctagcaaatgattcccattatggattaggagctgcagtaatatctaatgatgcagaaagatgtgaccgtgtaagccaggactttgaagctgggattgtgtggattaactgctcacagccttgctttactcaagctccatggggtggagtcaaacgcagtgggtttggacgcgaattaggagaatggggactcgataactacttgagtgtgaagcaagtgactctctacacatcaaacgacccgtggggatggtacaaacccccttgctaa

SEQ ID NO: 522 - protein, 502 aa, Brassica napus
MAIPPVPTRQLFIDGEWREPILKNRIPIVNPSTQDVIGHIPAATKEDVEVAVNAARRAFSRNKGKDWAKAPGDLRAKYLRAIAAKVTERKSHLATLESLDSGKPLDETVWDMEDVAGCFEFYADLAEGLDAKQKAPVSLPMESFKSYVLKQPIGVVGLITPWNYPLLMAVWKVAPSLAAGCTAVLKPSELASVTCLELADICREVGLPPGVLNVLTGYGSEAGAPLAAHPSVDKIAFTGSFATGSKVMTAAAQLVKPVSMELGGKSPLIVFDDVDLDKAAEWALFGCFWTNGQICSATSRLLVHENIASEFIEKLVKWSKNIKVSDPLEEGCRLGPVVSEGQYEKILKFISSAKSEGATILHGGSRPEHLKKGFFIEPTIITDVTTSMQIWREEVFGPVLCIKTFSSEDEAIELANDSHYGLGAAVISNDAERCDRVSQDFEAGIVWINCSQPCFTQAPWGGVKRSGFGRELGEWGLDNYLSVKQVTLYTSNDPWGWYKPPC

SEQ ID NO: 523 - DNA, 1614 bp, Brassica napus
  CDS (1)..(1614)
atggcgtcaagaagagtttcctcgctgctctctcgctccctcatgtcctcctcttctcccttctctcttagaggtaaagatcctctcatgaacagaggagctcgcaggtacagcaacctcgctgcttctctcgaagacaccatcactccgcctgtgaaagtcgagcagactcagctcctaatcaacggcaagttcgttgattcagcctcaggaaagactttccccacattggatccaagaactggggaagtgatagctcaggtggctgagggtgacgtggaagacgtgaaccgtgcggttgtagccgcgcgcaaggcctttgacgagggtccatggcctagaatgactgcttacgagaggccgaagatactgtttcgtttcgctgacttgattgagaaacacaacgacgagatcgctgctctcgagacttgggacaatgggaagccttatgagcagtctgccaagattgaagttcctatgcttgctagagtgttccgttactatgctggttgggcggacaagatccatggaatgacggttcgaggagacggttcgcaccatgtgcagacgctccacgagccgattggagtcgctggacagatcatcccatggaacttccctcttctcatgctctcgtggaagcttggaccagctttagcttgcgggaacaccgttgtgctcaagacggctgagcagactcctctctctgctcttcttgttggaagactacttcacgaggctggacttcctgaaggagttgtgaatatagtttctggatttggtcctaccgctggtgcagccattgctagtcacatggatattgataaggttgctttcaccggttctactgatgttggaaagattattcttgagttggcttcaaaaagtaacctcaaggcagtgtctcttgagcttggaggcaagtcaccattcattgtatgtgaagatgctgacgtggatcaggccgttgagatggctcatttcgctttgttctttaaccagggacaatgctgctgtgctggctcgcgtacatttgtacatgaacgagtgtatgatgagtttgtagagaaagctaaaactcgtgcaatcaaccgcgctgttggagatcccttcaagtcagggattgagcaaggtccccaggtggactcagagcagttcgagaaaatcctgaagtacattagacatggagtcgatagtggagccaccttacaagctggaggtgaccgtcatggttccaagggttactacattcaacctactgtcttctctgacgtcaaggacgacatgctcatagcaaaagacgagatcttcggaccagttcagaccatacttaagttcaagaatctggatgaggtgattgcaagggcgaacaactcaaggtacggtctagctgcaggagtgttcacacagaatctggacacagcgaataggctgatgcgagcgctcagggttggaagcgtttggataaactgtttcgatgtgtttgatgcaacaattccatttggagggtataagatgagtggcattggaagagagaaaggtatctacagtctcaacaattacttgcaagtcaaggctgttgtcacttccatcaagaaccccgcttggctctaa

SEQ ID NO: 524 - protein, 537 aa, Brassica napus
MASRRVSSLLSRSLMSSSSPFSLRGKDPLMNRGARRYSNLAASLEDTITPPVKVEQTQLLINGKFVDSASGKTFPTLDPRTGEVIAQVAEGDVEDVNRAVVAARKAFDEGPWPRMTAYERPKILFRFADLIEKHNDEIAALETWDNGKPYEQSAKIEVPMLARVFRYYAGWADKIHGMTVRGDGSHHVQTLHEPIGVAGQIIPWNFPLLMLSWKLGPALACGNTVVLKTAEQTPLSALLVGRLLHEAGLPEGVVNIVSGFGPTAGAAIASHMDIDKVAFTGSTDVGKIILELASKSNLKAVSLELGGKSPFIVCEDADVDQAVEMAHFALFFNQGQCCCAGSRTFVHERVYDEFVEKAKTRAINRAVGDPFKSGIEQGPQVDSEQFEKILKYIRHGVDSGATLQAGGDRHGSKGYYIQPTVFSDVKDDMLIAKDEIFGPVQTILKFKNLDEVIARANNSRYGLAAGVFTQNLDTANRLMRALRVGSVWINCFDVFDATIPFGGYKMSGIGREKGIYSLNNYLQVKAVVTSIKNPAWL

SEQ ID NO: 525 - DNA, 1614 bp, Brassica napus
  CDS (1)..(1614)
atggcgtcaagaagagtgtcctcgcttctatctcgctccctcatctcctcctcttctctcttctcccttagaggtaaagatcctctcctgaacagaggagctcgcaggtacagcaacctcgctgcttctctcgaagacaccatcactccaccagtgaaagtcgagcacactcagctcctaatcaacggaaagttcgttgattcagcctcaggaaagactttccccacgttggatccaagaactggggaagtgatagctcaggtggctgagggtgacgtggaagacgtgaaccgtgcggttgtagccgcgcgcaaggcctttgaccagggtccatggcctagaatgactgcttatgagaggtcgaagatactgtttcgtttcgctgacttgattgagaaacacaacgacgagattgctgctcttgagacttgggacaacgggaagccttatgagcagtctgccaatattgaagttcctatgcttgctagagtgttccgttactatgctggttgggcagacaagatccatggaatgacggttcctggagacggttcccaccacgtgcagacgctccacgagccgattggagtcgctggacagatcatcccatggaacttccctcttctcatgctctcgtggaagcttggaccagctttagcttgccggaacaccgttgtgctcaagaccgctgagcagactcctctctctgctcttcttgttggaaaactacttcatgaggctggacttcctgaaggagttgtgaatatagtttctggatttggtcctaccgctggtgcagccattgctagtcacatggacattgataaggttgctttcaccgggtctactgatgttggaaagattattcttgagttggcttcaaaaagtaacctcaaggcagtgacccttgagcttggaggcaagtcacctttcattgtatgtgaagatgctgatgtggatcaggccgttgagatggctcatttcgctctcttctttaaccagggacaatgctgctgtgctggctcgcgtacatttgtacatgaacgcgtgtatgatgagtttgtagagaaagccaaagctcgtgcaatcaaccgcgctgttggagatcccttcaagtcaggcattgagcaaggtccccaggtggactcagagcagttcgagaaaatcctgaagtacattagacatggagtcgatagtggagccaccttacaagctggaggtgaccgtcatggctccaagggttactacattcaacccactgtcttctctgacgtcaaggatgacatgctcatagcaaaagacgagatcttcggaccagttcagaccatacttaagttcaagaatctggatgaggttattgcaagggcgaacaactcaagatacggtctagctgcaggagtgttcacacagaatctggacacagcgaataggctgatgcgagcgctgagggttggaagcgtttggataaactgtttcgatgtgtttgatgccacaattccatttggagggtataagatgagtggcattggaagagagaaaggtatctacagtctcaacaattacttgcaagtcaaggctgttgtcactgccatcaagaaccccgcttggctctaa

SEQ ID NO: 526 - protein, 537 aa, Brassica napus
MASRRVSSLLSRSLISSSSLFSLRGKDPLLNRGARRYSNLAASLEDTITPPVKVEHTQLLINGKFVDSASGKTFPTLDPRTGEVIAQVAEGDVEDVNRAVVAARKAFDQGPWPRMTAYERSKILFRFADLIEKHNDEIAALETWDNGKPYEQSANIEVPMLARVFRYYAGWADKIHGMTVPGDGSHHVQTLHEPIGVAGQIIPWNFPLLMLSWKLGPALACRNTVVLKTAEQTPLSALLVGKLLHEAGLPEGVVNIVSGFGPTAGAAIASHMDIDKVAFTGSTDVGKIILELASKSNLKAVTLELGGKSPFIVCEDADVDQAVEMAHFALFFNQGQCCCAGSRTFVHERVYDEFVEKAKARAINRAVGDPFKSGIEQGPQVDSEQFEKILKYIRHGVDSGATLQAGGDRHGSKGYYIQPTVFSDVKDDMLIAKDEIFGPVQTILKFKNLDEVIARANNSRYGLAAGVFTQNLDTANRLMRALRVGSVWINCFDVFDATIPFGGYKMSGIGREKGIYSLNNYLQVKAVVTAIKNPAWL

SEQ ID NO: 527 - DNA, 1620 bp, Glycine max
  CDS (1)..(1620)
atggcttcttcattgaggatctcaaggctcctctctcgttcttttctttctgcttccactactactcctttgttttctagaggcggaagtggtgctcttggtgcagggctcagtaaattcagcactgctgctgccattgaagaaccaattaaaccaccaattaaagtagaacacacccagctcttaattgatggaaaatttgttgatgctgctactggcaaaacttttccaacgttggaccccaggacaggagatgtgatttctcatgttgctgagggtgaccatgaagatgttgatcgagcagttgcagctgctcgcaaagccttcgaccgcggaccttggccaaagatgacagcctatgaaagacaaaggatattgctgcgtgctgctgatctgtttgaaaagcacaatgatgaccttgctgcactcgagacttgggataatgggaagccatatgaacagtctgctcaaatcgaaattccaatgctggttcgcctatttcgatactatgctggttgggcagataagattcatggtctcacagttccagctgatgggccatatcatgtgcaaacattgcatgaacccattggtgttgccggtcagatcattccgtggaacttccctcttgtcatgtttgcctggaaggttgggccagcattggcctgtggtaacaccattgttctcaaaacagctgagcagactccattatctgctttgtatgcatcaaagttgcttcatgaggctggactgcctcctggtgttctgaatataatatctggctttggtccaactgccggtgctgctattgctagtcacatggacatagataagcttgctttcactggttcaaccgaaactggaaaaattgtccttgaactggcggctagaagtaaccttaagcctgtaactttggagcttggtgggaaatccccattcattgtatgcgaagatgctgatgtagatgaggctgttgagctagcacactttgcattattctttaatcagggacaatgctgctgtgccgggtctagaacatttgtacacgaacgtgtgtacgatgaatttattgagaaagcaaaggcacgcgctttgaagcgtgctgttggtgatccattcaaggggggaatagagcaaggtcctcagattgattcagaacaatttcagaaaatactgaagtatattagatccggtgttgaaagtggagctactcttgaaaccggaggagatagatttggcaactcgggcttctatattcagcctactgtcttctcaaatgttaaggatgacatgctgattgcgaaggaagagatctttggcccagtgcaaagcatattaaaattcaaggaccttgatgatgtgattcaaagagcaaataacacacactatggccttgcagcaggggtgttcacaaaaaacattaacacagctaatactttgactagagcattgagagctggaacagtgtgggtgaactgctttgatacatttgatgcagcaattccctttggagggtacaaaatgagtggtcaaggaagagaaaaaggagaatacagtctcaagaattacttgcaagtgaaggctgttgttacatccttgaagaacccagcttggctttga

SEQ ID NO: 528 - protein, 539 aa, Glycine max
MASSLRISRLLSRSFLSASTTTPLFSRGGSGALGAGLSKFSTAAAIEEPIKPPIKVEHTQLLIDGKFVDAATGKTFPTLDPRTGDVISHVAEGDHEDVDRAVAAARKAFDRGPWPKMTAYERQRILLRAADLFEKHNDDLAALETWDNGKPYEQSAQIEIPMLVRLFRYYAGWADKIHGLTVPADGPYHVQTLHEPIGVAGQIIPWNFPLVMFAWKVGPALACGNTIVLKTAEQTPLSALYASKLLHEAGLPPGVLNIISGFGPTAGAAIASHMDIDKLAFTGSTETGKIVLELAARSNLKPVTLELGGKSPFIVCEDADVDEAVELAHFALFFNQGQCCCAGSRTFVHERVYDEFIEKAKARALKRAVGDPFKGGIEQGPQIDSEQFQKILKYIRSGVESGATLETGGDRFGNSGFYIQPTVFSNVKDDMLIAKEEIFGPVQSILKFKDLDDVIQRANNTHYGLAAGVFTKNINTANTLTRALRAGTVWVNCFDTFDAAIPFGGYKMSGQGREKGEYSLKNYLQVKAVVTSLKNPAWL

SEQ ID NO: 529 - DNA, 1611 bp, Glycine max
  CDS (1)..(1611)
atggcttcttcactcagaatctcaagacttatctctcgctccttttcttctacttctttcttttcacgaggtgggaatggtttccttggttcaagacaaagtaaattcagcacttctgctgccattgaggaagaacccattaaaccatcaatacaagtagaacacacccaactcttaattgatggaaaatttgtagatgctgcttctggtaaaacttttcaaactttagatcctaggacaggtgaagtgattgctcatgttgctgagggtcactctgaagatgttgatcgagcagtttcagctgcacgaaaagcatttgatcatggaccatggcctaagatgacagcttatgaacggcaaaggatcttgttgcgtgtggccgatctgatcgagaagcataatgatgagcttgcagcacttgagacttgggataatggaaagccttatgaacaagctgctaagattgaagttccaatgcttgttcgcctgattcgatactatgctggttgggcagataagattcatggtctaacagttccagctgatggaccttatcatgtgcaaacattgcacgaaccgattgatgttgccggtcagatcattccatggaacttccctcttctcatgtttgcctggaaggttggaccggcattggcctgtggcaacaccattgttctcaaaacagctgagcagacaccattatctgctttatatgcagcaaaactatttcatgaggctggacttcctgctggtgttttgaatgtagtttccggctttggtccaactgctggtgctgctcttgctagtcacatggaggttgataagcttgcttttaccggttccactgatactgggaaagttgtccttgaactggcggctaaaagcaatcttaagcctgttactttggagcttggtgggaaatctccctttatagtgtgtgaagacgctgatgtagatcaggctgttgagctcgcacactttgccttattctttaatcagggacaatgttgctgtgctgggtctcgaacatttgtacatgaaaatgtatacgaggagtttgttcagaaagcaaaggctcgtgctttgagacgtgttgttggtgatccattcaaggggggaatagagcaaggtcctcagattgattcagaccaatttgagaaaatactgaggtacatcagatccggtgttgaaagcggggcaacccttgaaacaggaggagacaagcttggcaacaagggcttctacattcaacctacagtcttctcaaatgttaaggatggcatgctgattgcaaaggatgagatctttggtccagtccaatccatattaaaattcaaggaccttggtgaggtagttcaaagagcgaacaacacacgttacgggcttgcggcaggagtgttcacaaagaacatggacactgcaaacactttgacgcgggcactgagagttggaacagtttggataaactgctttgacacatttgatgctgcaattccctttggagggtacaaaatgagtggtcaaggcagagaaaaaggagagtatagtctcaaaaactacttgcaagtgaaggctgtcgttaatcccttgaagaacccagcatggctttga

SEQ ID NO: 530 - protein, 536 aa, Glycine max
MASSLRISRLISRSFSSTSFFSRGGNGFLGSRQSKFSTSAAIEEEPIKPSIQVEHTQLLIDGKFVDAASGKTFQTLDPRTGEVIAHVAEGHSEDVDRAVSAARKAFDHGPWPKMTAYERQRILLRVADLIEKHNDELAALETWDNGKPYEQAAKIEVPMLVRLIRYYAGWADKIHGLTVPADGPYHVQTLHEPIDVAGQIIPWNFPLLMFAWKVGPALACGNTIVLKTAEQTPLSALYAAKLFHEAGLPAGVLNVVSGFGPTAGAALASHMEVDKLAFTGSTDTGKVVLELAAKSNLKPVTLELGGKSPFIVCEDADVDQAVELAHFALFFNQGQCCCAGSRTFVHENVYEEFVQKAKARALRRVVGDPFKGGIEQGPQIDSDQFEKILRYIRSGVESGATLETGGDKLGNKGFYIQPTVFSNVKDGMLIAKDEIFGPVQSILKFKDLGEVVQRANNTRYGLAAGVFTKNMDTANTLTRALRVGTVWINCFDTFDAAIPFGGYKMSGQGREKGEYSLKNYLQVKAVVNPLKNPAWL

SEQ ID NO: 531 - DNA, 1482 bp, Zea mays
  CDS (1)..(1482)
atgagcgcggacgcgagcgccgcgatggagaagatccgcgccgcgggtctgctcaagacgcaggggctcatcgccggacagtgggtcgacgcatacgatggcaagaccatcgaggtgcaaaatccagcaactggcgaggtccttgcaaacgtgtcctttatgggcagcagagaaacatctgatgctattgcttctgctcacagtacattctattcttggagtaaactcactgcaagtgagagaggcaaggcactaagaaaatggtacgatctaattatttcacacaaggaagagcttgcacttctcatgacactggagcaggggaaacctatgaaagaagcccttggtgaggtcaattatggtgcaagtttcatagaatattttgcagaggaagcaaagcgcatatatggtgatataattcctccaactttatctgatcgtagattgttggttctgaagcagcctgttggggtagttggagctattacaccatggaattttccattagcaatgataacccgaaaggttggaccagctttggcctgtggctgcactgttgttgtcaagccatcagagttcacacctctgacatcattagctgcagcagatcttgctcttcaagctggaataccagcgggtgcactaaatgttgtgatgggcaatgctcctgagataggtgatgcattactgcagagtacacaggtcagaaagattacgttcactggatcaacagctgttggcaaaaaactgatggctgaatctgcaaatactgtgaaaaaggtctctttggaacttggtgggaatgcaccttgcattgtttttgatgatgcagacattgatgttgctgttaaaggcagtcttgctgccaagttccgtaacagtggacagacatgtgtttgtgcaaacaggatactggtgcaagaaggtatctacgaaaagtttgcatctgcattcatcaaggctgttcagagtttgaaggttgggaatgggctagaagagagtacatctcagggtcctctgattaacgaagctgctgttcaaaaggtggagaagttcataaatgacgcgacttcaaagggagcaaatgtcatgctaggtggtaaaagacacagcctggggatgtcatcttatgagccaactgtagtagggaatgtcagcaatgatatgcttcttttcagagaagaagtttttggtccagttgcaccccttataccattcaaaactgaggaagaagctgtccatatggccaacgatacaaacgcaggcttagctgcatacatatttaccaagagcatacctcgttcatggcgtgtatccgaatctcttgaatacggcttagttggggtaaacgaggggattatttcaacagaggtggcaccatttggcggagtaaagcagtctggtcttgggagagaaggatcgaagtacggcgtcgacgaatacttggagctcaagtacatctgcatgggcaacttgggttga

SEQ ID NO: 532 - protein, 493 aa, Zea mays
MSADASAAMEKIRAAGLLKTQGLIAGQWVDAYDGKTIEVQNPATGEVLANVSFMGSRETSDAIASAHSTFYSWSKLTASERGKALRKWYDLIISHKEELALLMTLEQGKPMKEALGEVNYGASFIEYFAEEAKRIYGDIIPPTLSDRRLLVLKQPVGVVGAITPWNFPLAMITRKVGPALACGCTVVVKPSEFTPLTSLAAADLALQAGIPAGALNVVMGNAPEIGDALLQSTQVRKITFTGSTAVGKKLMAESANTVKKVSLELGGNAPCIVFDDADIDVAVKGSLAAKFRNSGQTCVCANRILVQEGIYEKFASAFIKAVQSLKVGNGLEESTSQGPLINEAAVQKVEKFINDATSKGANVMLGGKRHSLGMSSYEPTVVGNVSNDMLLFREEVFGPVAPLIPFKTEEEAVHMANDTNAGLAAYIFTKSIPRSWRVSESLEYGLVGVNEGIISTEVAPFGGVKQSGLGREGSKYGVDEYLELKYICMGNLG

SEQ ID NO: 533 - DNA, 1530 bp, Hordeum vulgare
  CDS (1)..(1530)
atggcgagcttcgcgagggaggagcaccagttcctcgccgagctcggcctcgcgccgcgcaacccgggctccttcgcctgcggcgcctggggcggctcgggccccgtcgtcgccaccaccaaccccaccaacaacgaggtcattgccgaggtcgtcgaagcgtccgtggacgactacgagaagggcatgagcgcctgcttcgatgccgccaggacctggatggctgtcccggctccgaaacgaggagaaattgttaggcagattggtgatgccctgagagcaaagcttcatcacctcggcagacttctgtcacttgagatggggaaaattctccctgaaggaattggggaggttcaggaaattattgacatgtgtgattatgctgtggggctaagtcgtcagctaaatggatccatcataccatctgaacgcccaaaccatatgatgatggaggtctggaatcctcttggagttgttggtgtcatcacagcattcaatttcccttgcgccgtgctgggttggaatgcttgcattgctttggtctgcggcaactgtgttgtctggaagggtgctccaactactccattgatcactattgcaatgactaaaatagtggctagtgtatttgagaagaacaacttgccaagtgcaatcttcacagctttttgtgggggtgctgaaattggtcaagcaattgctcttgacacaaggatacctttggtttcattcacaggaagtacaaaggttggtcaaatggttcagcaacaggttagcgcgagatttggtaaatgccttcttgaacttagtgggaacaatgccattattgtcatggatgatgcagacattccactagctgtgcgttctgttttgtttgctgctgttggcacagcagggcaacgatgcactacatgtcgtaggctgcttcttcatgaaagcatatatcaaacatttcttgatcaacttgttgaggtttataaacaagtccgtattggggatcctatggaaaagggcaccttgctgggaccactgcacactactgcatcaaaagaaagctttttgaaaggcatccaaactatcagatcccagggaggaaaaatccttctaggaggatcttctattgaatcagaagggaactttgttcaaccaacaattgtggaaatttcacctgatgcgccagttgtgagggaagaattgtttggtcctgtcctttatgccatgaaatttcagaccctgaaggaagcaattgaaatcaacaattctgttcctcaaggattgagcagttctatatttacaaggaagccagatgctattttcaagtggattgggcctcatggtagtgattgtggtatagtgaatgtaaatatacccactaatggtgctgaaattggtggagcttttggtggagaaaaagcaaccggtggcggacgagaagcaggaagtgattcctggaagcaatacatgaggagggctacttgtacaatcaactacggaagcgagctgcctctagcacagggaataaattttggctag

SEQ ID NO: 534 - protein, 509 aa, Hordeum vulgare
MASFAREEHQFLAELGLAPRNPGSFACGAWGGSGPVVATTNPTNNEVIAEVVEASVDDYEKGMSACFDAARTWMAVPAPKRGEIVRQIGDALRAKLHHLGRLLSLEMGKILPEGIGEVQEIIDMCDYAVGLSRQLNGSIIPSERPNHMMMEVWNPLGVVGVITAFNFPCAVLGWNACIALVCGNCVVWKGAPTTPLITIAMTKIVASVFEKNNLPSAIFTAFCGGAEIGQAIALDTRIPLVSFTGSTKVGQMVQQQVSARFGKCLLELSGNNAIIVMDDADIPLAVRSVLFAAVGTAGQRCTTCRRLLLHESIYQTFLDQLVEVYKQVRIGDPMEKGTLLGPLHTTASKESFLKGIQTIRSQGGKILLGGSSIESEGNFVQPTIVEISPDAPVVREELFGPVLYAMKFQTLKEAIEINNSVPQGLSSSIFTRKPDAIFKWIGPHGSDCGIVNVNIPTNGAEIGGAFGGEKATGGGREAGSDSWKQYMRRATCTINYGSELPLAQGINFG

SEQ ID NO: 535 - DNA, 1509 bp, Brassica napus
  CDS (1)..(1509)
atggcgattcctcctgtgcctactcgccagctcttcatcgacggcgaatggagagagccaatcttgaagaatcgcatccccattgtcaatccatcaacccaagatgtcattggtcatatccccgcggctacaaaggaggatgtggaggttgcagtcaacgctgctcgaagggctttctcaaggaacaaaggtaaagattgggccaaagcaccaggagatcttcgtgctaagtatctacgcgctattgctgctaaggtgactgagaggaagtcgcatctggcgacgcttgagtcgcttgatagtggtaaaccattggatgagacagtctgggatatggaggatgttgctgggtgttttgagttttatgctgaccttgctgaaggcttagatgctaagcagaaagcgcctgtttctcttcccatggagagttttaagagttatgttctcaagcaacctattggagttgtgggactcatcacaccttggaattacccccttctgatggctgtttggaaggtggctccctcacttgctgcaggatgtactgcggttctaaaaccatcagagttggcttcagtcacttgtttggagcttgctgatatctgtcgggaagttggtcttcctcctggtgtcctcaacgttcttactggatatggttctgaagctggtgctcctttggcagcacatcctagtgtggacaagattgcttttaccggaagctttgccacgggaagcaaggtcatgacagctgctgctcagttggtgaagcctgtttccatggaactgggtgggaagagccctctcattgtgttcgatgacgttgatcttgacaaagctgctgaatgggctctcttcggttgcttctggacaaatggtcagatctgcagtgcaacttcccgccttcttgttcatgaaaacatcgcatctgaattcatagaaaaacttgtaaaatggagcaagaacattaaagtttctgaccccttggaagaaggatgcaggcttggtcctgttgtcagcgaagggcagtacgagaaaattttgaagtttatctcaacggctaaaagtgaaggggcaacgattttacatgggggttcccgacctgagcatctgaaaaagggcttcttcatcgaaccaaccatcataactgatgtaaccacttcaatgcaaatttggagagaagaagtttttgggcctgttctttgcgtgaaaacattctccagtgaggatgaggcaattgagctagcaaatgattcccattacggattaggagctgcagtaatatctaatgatgcagaaaggtgtgaccgcgtaagccaggactttgaagctgggattgtgtggattaactgctcacagccttgctttactcaagctccatggggtggagtcaaacgcagtgggtttggacgcgaattaggagaatggggacttgataactacttgagtgtgaagcaagtgacgctctacacatcaaacgacccatggggatggtacaaacccccttgctaa

SEQ ID NO: 536 - protein, 502 aa, Brassica napus
MAIPPVPTRQLFIDGEWREPILKNRIPIVNPSTQDVIGHIPAATKEDVEVAVNAARRAFSRNKGKDWAKAPGDLRAKYLRAIAAKVTERKSHLATLESLDSGKPLDETVWDMEDVAGCFEFYADLAEGLDAKQKAPVSLPMESFKSYVLKQPIGVVGLITPWNYPLLMAVWKVAPSLAAGCTAVLKPSELASVTCLELADICREVGLPPGVLNVLTGYGSEAGAPLAAHPSVDKIAFTGSFATGSKVMTAAAQLVKPVSMELGGKSPLIVFDDVDLDKAAEWALFGCFWTNGQICSATSRLLVHENIASEFIEKLVKWSKNIKVSDPLEEGCRLGPVVSEGQYEKILKFISTAKSEGATILHGGSRPEHLKKGFFIEPTIITDVTTSMQIWREEVFGPVLCVKTFSSEDEAIELANDSHYGLGAAVISNDAERCDRVSQDFEAGIVWINCSQPCFTQAPWGGVKRSGFGRELGEWGLDNYLSVKQVTLYTSNDPWGWYKPPC

SEQ ID NO: 537 - DNA, 1530 bp, Brassica napus
  CDS (1)..(1530)
atgggttcagcgagcaaagagtatgagtttctgagcgagattgggttaagcagctctcacaaccttggaaactacatcggtggcaaatggctaggaaacggtcctcttgtttctactctgaatcctgctaacaatcagccaattgctcaagttgtggaagcttctcttgaagactacgagacaggtctcagagcttgtgaggaagcagctaagacatggatgcaggttcctgctcccaagagaggtgatattgtgagacaaattggggatgcgctgagatccaaacttgactatcttggccgtcttctttctcttgaaatgggaaagatccttgccgaaggcatcggtgaagttcaggaagtgattgacatgtgtgattttgctgttggtttgagccgacaactcaatggttcagtcataccttcagaacgcccaaaccatatgatgttggagatgtggaatcctcttggcattgtcggtgtcatcacagcgtttaacttcccatgtgcagttcttggctggaatgcttgcattgcactggtctgcggaaactgtgtagtctggaaaggtgctccaactacaccgttgattaccatcgcaatgaccaaactagtggctgaagttctagagaagaatcatttacccggtgccattttcactgccatgtgtggtggtgctgagattggtgaagcaatagccaaggacacacgcattcctctagtatcctttactggtagctccaaggtgggcttaacggtgcaacaaacagtgagcgcgagatctggcaaaactctgcttgaactgagtggaaacaatgcgatcatagtcatggacgatgctgacattcagttagctgcacgttctgttctgtttgctgcggttggaacagctggtcaacgctgcacaacttgccgtaggctgctattgcatgagagtgtgtatgacaaagtacttgagcaactcctgacttcatacaaacaagtcaagatcggtgatcctctcgagaaagggacgttgttaggaccattacatactcctgaatcaaagaaaaactttgagaaagggattgaagtcatcaaatcccagggtggcaaagtactaacgggaggtaaagcagttgaaggtgaaggaaacttcgtggagcctacgataatagagatatcatcagatgctgctgttgttaaagaagagctctttgctccggttttatatgctctcaagtttaagacatttgaagaagctgttgcgataaataactcggttcctcaaggtctaagcagctctatattcactcgtagccccgagaacatcttcaagtggataggaccaatgggaagtgactgtgggatagtgaatgtgaacataccgacgaatggagctgagataggaggagcttttggaggtgagaaagcgactggtggtggtcgtgaagctggtagtgactcttggaagcagtatatgcgccgttccacttgcacgattaactacgggaacgagttacctctagcgcaaggaatcaacttcggttaa

SEQ ID NO: 538 - protein, 509 aa, Brassica napus
MGSASKEYEFLSEIGLSSSHNLGNYIGGKWLGNGPLVSTLNPANNQPIAQVVEASLEDYETGLRACEEAAKTWMQVPAPKRGDIVRQIGDALRSKLDYLGRLLSLEMGKILAEGIGEVQEVIDMCDFAVGLSRQLNGSVIPSERPNHMMLEMWNPLGIVGVITAFNFPCAVLGWNACIALVCGNCVVWKGAPTTPLITIAMTKLVAEVLEKNHLPGAIFTAMCGGAEIGEAIAKDTRIPLVSFTGSSKVGLTVQQTVSARSGKTLLELSGNNAIIVMDDADIQLAARSVLFAAVGTAGQRCTTCRRLLLHESVYDKVLEQLLTSYKQVKIGDPLEKGTLLGPLHTPESKKNFEKGIEVIKSQGGKVLTGGKAVEGEGNFVEPTIIEISSDAAVVKEELFAPVLYALKFKTFEEAVAINNSVPQGLSSSIFTRSPENIFKWIGPMGSDCGIVNVNIPTNGAEIGGAFGGEKATGGGREAGSDSWKQYMRRSTCTINYGNELPLAQGINFG

SEQ ID NO: 539 - DNA, 1491 bp, Brassica napus
  CDS (1)..(1491)
atggctgggactggaattttcacagagattctagacggagaagtctacaagtactactctgatggagagtggagaacttcttcctccggtaaaagtgtggccatcgttaaccctgccacgaggaagacacagtacaaggttcaagcatgcacgcaagaagaagtgaacaaggtgatggagatggctaaatctgctcagaagtcatgggcaaagactcctctttggaaaagagctgagcttcttcacaaagctgctgcgatcctcaaggacaacaaagctcccattgctgagtctcttgtcaaggaaattgctaaaccagccaaagattctgtcactgaggttgtgaggtctggagatttgatctcttattgtgctgaagaaggtgttaggatcttaggtgaagggaagtttctgctctctgatagcttccctgggaatgaacgtaccaagtactgcctcacttccaagatccctctcggtgtggttttggctattcctccattcaactatcctgtcaatctcgctgtatcgaagattgctcctgctttgatagctggaaactcccttgtcctgaaacctccaactcaaggagctgtttcttgccttcatatggtgtattgctttcacttagctggtttcccaaaaggtctcattagctgcatcacaggaaaaggctctgagattggagatttcctcactatgcaccctgctgttaactgcattagtttcaccggcggtgataccggaatctcaatctccaagaaagctggtatgatccctcttcagatggaacttggaggaaaagatgcatgcattgtcctggaagatgctgatcttgatttagtcgcttccaatatcatcaaaggaggattctcctacagtgggcagagatgcactgcggttaaggtagtcctagtgataaaatcagtggcggatgagcttgtagagaaagtgaaagctaaagtggcgaaactcacggtgggaccgcctgaagagaactgcgatattacagcggtggtgtcggaatcctcggctaatttcattgaaggattggtgatggatgctaaggagaaaggagcaacgttctgtcaagagtataaaagagaaggcaacttgatttggccgttgcttttggacaatgtcagaccagacatgaggattgcttgggaggaacctttcggtcctgtcttgcctgtcttgaggatcagttctgttgaggaaggcattaatcattgcaatgctagtaactttggcctccagggatgtgtattcactaaagacatcaacaaggcaatgctgatcagtgatgcaatggagacaggaacggttcagattaactctgcgccagctcgtggaccagaccatttccctttccagggactaaaggacagtggaatacgatcacaaagtgtgacaaatagcatcaatctgatgaccaaagtgaagaccactgtcattaacttgcctacaccctcatactctatgggttag

SEQ ID NO: 540 - protein, 496 aa, Brassica napus
MAGTGIFTEILDGEVYKYYSDGEWRTSSSGKSVAIVNPATRKTQYKVQACTQEEVNKVMEMAKSAQKSWAKTPLWKRAELLHKAAAILKDNKAPIAESLVKEIAKPAKDSVTEVVRSGDLISYCAEEGVRILGEGKFLLSDSFPGNERTKYCLTSKIPLGVVLAIPPFNYPVNLAVSKIAPALIAGNSLVLKPPTQGAVSCLHMVYCFHLAGFPKGLISCITGKGSEIGDFLTMHPAVNCISFTGGDTGISISKKAGMIPLQMELGGKDACIVLEDADLDLVASNIIKGGFSYSGQRCTAVKVVLVIKSVADELVEKVKAKVAKLTVGPPEENCDITAVVSESSANFIEGLVMDAKEKGATFCQEYKREGNLIWPLLLDNVRPDMRIAWEEPFGPVLPVLRISSVEEGINHCNASNFGLQGCVFTKDINKAMLISDAMETGTVQINSAPARGPDHFPFQGLKDSGIRSQSVTNSINLMTKVKTTVINLPTPSYSMG

SEQ ID NO: 541 - DNA, 1614 bp, Brassica napus
  CDS (1)..(1614)
atggcgtcaagaagagtttcctcgctgctctctcgctccctcatgtcctcctcttctcccttctctcttagaggtaaagatcctctcatgaacagaggagctcgcaggtacagcaacctcgctgcttctctcgaagacaccatcactccgcctgtgaaagtcgagcagactcagctcctaatcaacggcaagttcgttgattcagcctcaggaaagactttccccacattggatccaagaactggggaagtgatagctcaggtggctgagggtgacgtggaagacgtgaaccgtgcggttgtagccgcgcgcaaggcctttgacgagggtccatggcctagaatgactgcttacgagaggtcgaagatactgtttcgtttcgctgacttgattgagaaacacaacgacgagatcgctgctctcgagacttgggacaatgggaagccttatgagcagtctgccaagattgaagttcctatgcttgctagagtgttccgttactatgctggttgggcggacaagatccatggaatgacggttcgaggagacggttcgcaccatgtgcagacgctccacgagccgattggagtcgctggacagatcatcccatggaacttccctcttctcatgctctcgtggaagcttggaccagctttagcttgcgggaacaccgttgtgctcaagacggctgagcagactcctctctctgctcttcttgttggaagactacttcacgaggctggacttcctgaaggagttgtgaatatagtttctggatttggtcctaccgctggtgcagccattgctagtcacatggacattgataaggttgctttcaccggttctactgatgttggaaagattattcttgagttggcttcaaaaagtaacctcaaggcagtgtctcttgagcttggaggcaagtcaccattcattgtatgtgaagatgctgatgtggatcaggccgttgagatggctcatttcgctttgttctttaaccagggacaatgctgctgtgctggctcgcgtacatttgtacatgaacgagtgtatgatgagtttgtagagaaagccaaagctcgtgcaatcaaacgcgctgttggagatcccttcaagtcaggcattgagcaaggtccccaggtggactcagagcaattcaagaaaatcccgaagtacattaaacatggagttgagagtggagccaccttacaagctggaggcgaccgtcatggctccaagggatactacattcaacccactgtcttctcagacgtcaaagacgacatgctcatagcaaaagacgagatcttcggaccagttcaaaccatacttaaattcaagaatctagatgaggtgattgcaagggcgaacaactcaagatacggtctagctgcaggagtgttcacacagaatctggacacagcgaacaggctgatgcgagcgctcagggttggaagcgtttggataaactgtttcgatgtgtttgatgcaacaattccattcggagggtacaagatgagtggcattggaagagagaaaggtatctacagtctcaacaattacttgcaagtcaaggctgttgtcactgccatcaagaaccccgcttggctctaa

SEQ ID NO: 542 - protein, 537 aa, Brassica napus
MASRRVSSLLSRSLMSSSSPFSLRGKDPLMNRGARRYSNLAASLEDTITPPVKVEQTQLLINGKFVDSASGKTFPTLDPRTGEVIAQVAEGDVEDVNRAVVAARKAFDEGPWPRMTAYERSKILFRFADLIEKHNDEIAALETWDNGKPYEQSAKIEVPMLARVFRYYAGWADKIHGMTVRGDGSHHVQTLHEPIGVAGQIIPWNFPLLMLSWKLGPALACGNTVVLKTAEQTPLSALLVGRLLHEAGLPEGVVNIVSGFGPTAGAAIASHMDIDKVAFTGSTDVGKIILELASKSNLKAVSLELGGKSPFIVCEDADVDQAVEMAHFALFFNQGQCCCAGSRTFVHERVYDEFVEKAKARAIKRAVGDPFKSGIEQGPQVDSEQFKKIPKYIKHGVESGATLQAGGDRHGSKGYYIQPTVFSDVKDDMLIAKDEIFGPVQTILKFKNLDEVIARANNSRYGLAAGVFTQNLDTANRLMRALRVGSVWINCFDVFDATIPFGGYKMSGIGREKGIYSLNNYLQVKAVVTAIKNPAWL

SEQ ID NO: 543 - DNA, 1614 bp, Brassica napus
  CDS (1)..(1614)
atggcgtcaagaagagtttcctcgctgctctctcgctccctcatgtcctcctcttctcccttctctcttagaggtaaagatcctctcatgaacagaggagctcgcaggtacagcaacctcgctgcttctctcgaagacaccatcactccgcctgtgaaagtcgagcagactcagctcctaatcaacggcaagttcgttgattcagcctcaggaaagactttccccacattggatccaagaactggggaagtgatagctcaggtggctgagggtgacgtggaagacgtgaaccgtgcggttgtagccgcgcgcaaggcctttgacgagggtccatggcctagaatgactgcttacgagaggtcgaagatactgtttcgtttcgctgacttgattgagaaacacaacgacgagatcgctgctctcgagacttgggacaatgggaagccttatgagcagtctgccaagattgaagttcctatgcttgctagagtgttccgttactatgctggttgggcggacaagatccatggaatgacggttcgaggagacggttcgcaccatgtgcagacgctccacgagccgattggagtcgctggacagatcatcccatggaacttccctcttctcatgctctcgtggaagcttggaccagctttagcttgcgggaacaccgttgtgctcaagacggctgagcagactcctctctctgctcttcttgttggaagactacttcacgaggctggacttccggaaggagttgtgaatatagtgtctggatttggtcctacagctggtgcagccatagctagtcacatggacattgataaggttgctttcaccggttctactgatgttggaaagattattcttgagttggcttcaaaaagtaacctcaaggcagtgtctcttgagcttggaggcaagtcaccattcattgtatgtgaagatgctgatgtggatcaggccgttgagatggctcatttcgctttgttctttaaccagggacaatgctgctgtgctggctcgcgtacatttgtacatgaacgagtgtatgatgagtttgtagagaaagccaaagctcgtgcaatcaaacgcgctgttggagatcccttcaagtcaggcattgagcaaggtccccaggtggactcagagcaattcaagaaaatcccgaagtacattacacaaggagtcgagagtggagccaccttacaagctggaggcgaccgtcatggttccaagggttactacattcaacccactgtcttctctgacgtcaaggatgacatgctcatagcaaaagacgagatcttcggaccagttcagaccatacttaagttcaagaatctggatgaggttattgcaagggcgaacaactcaaggtacggtctagctgcaggagtgttcacacagaatctggacacagcgaataggctgatgcgagcgctcagggttggaagcgtttggataaactgtttcgatgtgtttgatgccacaattccatttggagggtataagatgagtggcattggaagagagaaaggtatctacagtctcaacaattacttgcaagtcaaggctgttgtcacttccatcaagaaccccgcttggctctaa

SEQ ID NO: 544 - protein, 537 aa, Brassica napus
MASRRVSSLLSRSLMSSSSPFSLRGKDPLMNRGARRYSNLAASLEDTITPPVKVEQTQLLINGKFVDSASGKTFPTLDPRTGEVIAQVAEGDVEDVNRAVVAARKAFDEGPWPRMTAYERSKILFRFADLIEKHNDEIAALETWDNGKPYEQSAKIEVPMLARVFRYYAGWADKIHGMTVRGDGSHHVQTLHEPIGVAGQIIPWNFPLLMLSWKLGPALACGNTVVLKTAEQTPLSALLVGRLLHEAGLPEGVVNIVSGFGPTAGAAIASHMDIDKVAFTGSTDVGKIILELASKSNLKAVSLELGGKSPFIVCEDADVDQAVEMAHFALFFNQGQCCCAGSRTFVHERVYDEFVEKAKARAIKRAVGDPFKSGIEQGPQVDSEQFKKIPKYITQGVESGATLQAGGDRHGSKGYYIQPTVFSDVKDDMLIAKDEIFGPVQTILKFKNLDEVIARANNSRYGLAAGVFTQNLDTANRLMRALRVGSVWINCFDVFDATIPFGGYKMSGIGREKGIYSLNNYLQVKAVVTSIKNPAWL

SEQ ID NO: 545 - DNA, 1593 bp, Brassica napus
  CDS (1)..(1593)
atggtactcggagctgcagcgcgtgtagctatcgtcggttgccgtaggctcgtctgctcctcctcacatgcttcccccctcctcgtctcctctcagtgccgccagatgagtatggatgcacaaagcgtctccgagaagctcaggagctcaggtcttctgcgcacacagggtcttataggaggaaagtggattgattcgtatgataagaccacaatcaaggttaacaacccagcaacgggtgaaattgtggctgatgttgcatgtatgggagtcaaagagacgaatgatgctattgcttcttcttacgaagcattccaatcttggagcacacggactgctggagagaggagtaaagttttaaggcgatggtttgaccttctggttgcacacaaggaagaacttggacaacttataactttggagcaaggaaaaccactaaaggaggctataggagaggtcgcatatggggcaagttttattgagtactatgcggaggaggcaaaacgtgtatacggtgatataattcctcctaatgcgtctgatcgccggttgttggtcctaaaacagcctgttggtgttgttggtgcaattaccccttggaactttcccttagctatgattactcgaaaggttggtcctgctctggcttctggttgcacggtggttgttaaaccatctgaacttacgcccctgacagcacttgctgcggccgaacttgcacttcaagctggagttcctccaggtgcacttaacgtggtcatgggaaatgctcctgaaattggggatgctttgcttgcaagtccacaggtgaggaaaatcacgttcacaggatcaacagcagttgggaagaagttgatggcagctgctgcacctaccgtcaagaaggtttctctagaacttggcggcaatgcaccctccataatatttgatgatgcagacctagatgtagcagtaaaaggaacgcttgcagcgaaatttaggaacagtggtcagacatgtgtatgtgcgaacagagtacttgtgcaagatggtatctatgataaatttgctgaggccttttctgaagcggttcaaaaattacaagtaggagatggctttaaggaggggacaacccagggtccacttataaacgatgcagcaattcaaaaggtagaatcattcgtgcaagatgccgtttccaagggagcaaaaatccttctcggcggcaaaaagcacagtctagggatgactttttatgagcctactgttatccgtgatgttacgagtaacatgattatgtctaaggaggagattttcggacccgtagctccccttattcggtttaagactgaggaggacgctatcagaatcgctaatgacactattgcaggacttgctgcgtatatattcacaaacagtgtccaacgatcgtggcgtgtatccgaagcacttgaatacggacttgtaggggtgaatgaaggaatcatatcaacagaggtggctccattcggtggagtgaagcagtctggacttggaagggaaggatctaagtacggtatggacgaataccatgagatcaaatacatatgcatgggagatatgaacagacagtga

SEQ ID NO: 546 - protein, 530 aa, Brassica napus
MVLGAAARVAIVGCRRLVCSSSHASPLLVSSQCRQMSMDAQSVSEKLRSSGLLRTQGLIGGKWIDSYDKTTIKVNNPATGEIVADVACMGVKETNDAIASSYEAFQSWSTRTAGERSKVLRRWFDLLVAHKEELGQLITLEQGKPLKEAIGEVAYGASFIEYYAEEAKRVYGDIIPPNASDRRLLVLKQPVGVVGAITPWNFPLAMITRKVGPALASGCTVVVKPSELTPLTALAAAELALQAGVPPGALNVVMGNAPEIGDALLASPQVRKITFTGSTAVGKKLMAAAAPTVKKVSLELGGNAPSIIFDDADLDVAVKGTLAAKFRNSGQTCVCANRVLVQDGIYDKFAEAFSEAVQKLQVGDGFKEGTTQGPLINDAAIQKVESFVQDAVSKGAKILLGGKKHSLGMTFYEPTVIRDVTSNMIMSKEEIFGPVAPLIRFKTEEDAIRIANDTIAGLAAYIFTNSVQRSWRVSEALEYGLVGVNEGIISTEVAPFGGVKQSGLGREGSKYGMDEYHEIKYICMGDMNRQ

SEQ ID NO: 547 - DNA, 1620 bp, Brassica napus
  CDS (1)..(1620)
atggcggctcgtagtagagtgtcttctctattgtcacgctccttttcagcttcctctccctttctctctcgttctcaaggaaaaaatttgaataatggaagtaggatcgtacggagatttggaacctcttctgcagctgaagaagtcataagcccatcggttcaagtttcttacacaaagctcctcatcgatgggaactttgtagacgctgcttctggtaagacgttcccgactcttgatccacgcacaggggaagtcattgcgcacgtagctgaaggtgatgctgaagatatcaaccgggctgtgaaagctgcaaggaaggcctttgatgaaggaccttggcctaagatgactgcttatgaaaggtcgagggtcatgttgagattcgcagatttggtcgagaaacacagcgaagagctcgctgctctagagtcatgggacaatgggaagacttatgaacaagcactaacagcagagattccaatggtcgccagattgttccgttactatgctgggtgggcggataagattcatgggcttacagttccagctgacggaaactatcatgttcagacactgcatgaacccataggtgttgctggtcagatcataccgtggaactttccgcttctgatgtttgcttggaaagttggtcctgctcttgcttgtggtaacaccattgtcctcaaaaccgctgaacagactcctctcactgctttctacgtcggcaaacttttccttgaagcgggtcttcctcctggtgttctgaatatagtttctggatttggtgcaaccgctggtgcttctctcgcaagtcacatggacgtagacaagcttgctttcacaggatcgactgatactggtaaagttatacttggactggctgctaacagcaatctcaagccggtaactctggaacttggagggaagtcaccgttcatcgtattcgaagatgctgatattgataaggctgtagagctggctcacttggctctcttctttaaccaggggcaaggttgctgcgcggggtctcggacatatgttcacgagaaagtgtatgatgagttcgttgagaaagcaaaggcacgcgctttaaaacgtgtggttggtgatcctttcaagaaaggcattgaacagggtcctcagatcgactcaaagcaattcgagaaagtgatgaagtacataaggtcaggagtggaaagcaatgctactcttgaatgtggtggtggtcaggttggagacagaggctacttcatccaacctacagtcttttctaatgttaaggacgacatgcttatcgctcaagacgagatttttggtccagtccagtccatcttgaagttcagtgatgttgatgaggtgataaagagggcgaacgacactaggtacgggctagccgcaggggttttcacaaagagcctggacactgcaaatagggtgtcgagggctttgaaagctggcaccgtttgggtcaactgtttcgatgtctttgacgcagccatcccctttggtggttacaagatgagcggcaacggcagagagaaaggtatttacagtctcaacaactacttgcaggtcaaggcagtcgtcactccccttaataaccctgcatggatctga

SEQ ID NO: 548 - protein, 539 aa, Brassica napus
MAARSRVSSLLSRSFSASSPFLSRSQGKNLNNGSRIVRRFGTSSAAEEVISPSVQVSYTKLLIDGNFVDAASGKTFPTLDPRTGEVIAHVAEGDAEDINRAVKAARKAFDEGPWPKMTAYERSRVMLRFADLVEKHSEELAALESWDNGKTYEQALTAEIPMVARLFRYYAGWADKIHGLTVPADGNYHVQTLHEPIGVAGQIIPWNFPLLMFAWKVGPALACGNTIVLKTAEQTPLTAFYVGKLFLEAGLPPGVLNIVSGFGATAGASLASHMDVDKLAFTGSTDTGKVILGLAANSNLKPVTLELGGKSPFIVFEDADIDKAVELAHLALFFNQGQGCCAGSRTYVHEKVYDEFVEKAKARALKRVVGDPFKKGIEQGPQIDSKQFEKVMKYIRSGVESNATLECGGGQVGDRGYFIQPTVFSNVKDDMLIAQDEIFGPVQSILKFSDVDEVIKRANDTRYGLAAGVFTKSLDTANRVSRALKAGTVWVNCFDVFDAAIPFGGYKMSGNGREKGIYSLNNYLQVKAVVTPLNNPAWI

SEQ ID NO: 549 - DNA, 1506 bp, Brassica napus
  CDS (1)..(1506)
atggagaacggtaaatgcaacggaggcgcgacggcgaagttaccggagatcaaattcaccaagcttttcattaacggccagttccttgatgctgcttcaggtaaaacctttgaaaccatagacccaaggaacggtgaagtgatcgcgaaaatagcagcaggagacaaagaagacgttgacttggccgttaacgctgcacgtcacgccttcgatcatggtccttggcctcgaatgactggcttcgagagggcaaggattatcaacaaatatacagacttaatacagcagaatattgaagaattggctgctcttgatgcggttgacggcggaaaattgttccaagtgggaaaaatgaatgacattccggctgcagccggacatttccggtactatgcgggtgcggcggataaaatccacggcgagacacttcgaatgacacgtccgtctttgttcggatacacacttaaagaacctattggagtggtcggccacatcatcccttggaattttccaagcattatgtttgccatgaaagtggctccggctttagctgctggttgcaccatggtggtcaagccagcagagcagacaccactctctgctttgttctatgctcatctctcgaaagaagcgggatttcctgatggcgtgatcaacgtggtgactggatttggatcaactgctggagctgccattgcctcccatatggacattgacaaagttagtttcacgggatcaactgatgttgggaggaagataatgcaagccgcagccacaagcaatctaaaaaaagtgtcccttgaattaagcggaaaatcgcctcttctcattttcgatgatgcagatgttaacaaagctgccgaacttgcgctactaggttgcttctacaacaagggtgagatctgcgtcacaagctctcatgcgtatgaccaacaagctatatacgataaggttgtagcgaaaatggtggagaaggttaaagactggaccgttggtgacccttttgattccacttctagacaaggacctcaagtggataaaaaacaacatgagaaggttctctcttacattgagcatggcaaaaacgaaggagctacgttattaactggagggaacgctattggagacaaaggatactacatcgaaccaactatattcgcagatgtcacggaagatatgaagatatacaaagaagaaatctttggaccagtcatgtctttgatgaaattcaagactatagaggaaggaatcaaatgcgcaaacaacacgaaatacggtctagcagctggaatagtgagccaaaacgttgacgtgattaacacggtttcgagatcaatcaaagctggagtcatttgggttaactgctacttcgcatttgacctcgactctccttacggtggctacaagatgagtggcaattgtcgtgaaagtggcatggacgctctcgatagctatctacaagtcaaatccattgccatgcctcttcacaactccccttggatgtag

SEQ ID NO: 550 - protein, 501 aa, Brassica napus
MENGKCNGGATAKLPEIKFTKLFINGQFLDAASGKTFETIDPRNGEVIAKIAAGDKEDVDLAVNAARHAFDHGPWPRMTGFERARIINKYTDLIQQNIEELAALDAVDGGKLFQVGKMNDIPAAAGHFRYYAGAADKIHGETLRMTRPSLFGYTLKEPIGVVGHIIPWNFPSIMFAMKVAPALAAGCTMVVKPAEQTPLSALFYAHLSKEAGFPDGVINVVTGFGSTAGAAIASHMDIDKVSFTGSTDVGRKIMQAAATSNLKKVSLELSGKSPLLIFDDADVNKAAELALLGCFYNKGEICVTSSHAYDQQAIYDKVVAKMVEKVKDWTVGDPFDSTSRQGPQVDKKQHEKVLSYIEHGKNEGATLLTGGNAIGDKGYYIEPTIFADVTEDMKIYKEEIFGPVMSLMKFKTIEEGIKCANNTKYGLAAGIVSQNVDVINTVSRSIKAGVIWVNCYFAFDLDSPYGGYKMSGNCRESGMDALDSYLQVKSIAMPLHNSPWM

SEQ ID NO: 551 - DNA, 1512 bp, Brassica napus
  CDS (1)..(1512)
atggcgattacggtgccgcgacggcagctcttcatcggcggtcaatggacagagccccttcgccgtcaaacactccctgttgtcaatcccgccacggaggacatcatcggttacatcccagctgcaacttctgaggatgtggaactcgcggtggaagctgctaggaaagcacttacaagaaacaaaggaaaggattggtctaaagcatccggggctgttcgtgccagatacttacgtgctattgcagctaaggtaacggagaggaaatctgaactagctaatcttgaggctattgactgcggtaaacctctagatgaagcagcatgggacatggatgatgttgctggatgttttgaatattatgctgacctagctcaaggcttagatgcaaagcagaaggctcctctttctcttcccttagatacttttaagggctacgttctcaaggaacccattggtgtagttggcctgattactccatggaattatccgttactgatggctgtttggaaagtcgctcctgcacttgctgctgggtgcacggcaatactgaaaccttctgagttggcctccgtgacatgtttggagctcgctgatatctgccgcgaggtgggtctgccacctggtgttcttaatattctgactggtttaggaactgaagcaggtgctccattggcatcgcatccacacgttgacaagattgttttcactggaagcacggcaactggaagcaacattatgacttctgctgccaaattggttaaacctgtttccttggagcttggtgggaaaagccctatcattgtctttgatgatgtcaaaattgacaaagctgtggaatggactatgtttggttgtttctggacaaacggtcagatttgcagtgcgacatctcgacttctcgtgcatgaaaagattgctgacgaatttttggacaagttggtaaagtggacaaagaacattaagatttcagatccttttgaagaaggctgtaggcttggtcctgttgtcagcaaaggacagtacgagagagtagtgaagtttgtctcaaacgctaggaaggaaggtgcaactgtcctctgcggaggagctcgtcctgggcatttaaaaaagggttattttgttgaacctgctataatttcaaatgtgactacttcaatggaaatctggagagatgaagtatttggtcctgttctctgtgtcaaaacattctccactgaggatgaggcaatacagctggcaaatgactcccaatatggattagcaggcgctgtattatcaaatgatctggagaggtgtgatcgcgttagtaaggcattcgaggcgggtattgtgtgggtcaactgttctcagccatgtttctgtcaagctccatggggtggaaccaaacgcagtggttttggccgtgaactaggagaatggggacttgggaactacttgagtgtgaagcaggtgacgcaatatatatctgatgaaccatggggatggtacaaacctccttccaagctttaa

SEQ ID NO: 552 - protein, 503 aa, Brassica napus
MAITVPRRQLFIGGQWTEPLRRQTLPVVNPATEDIIGYIPAATSEDVELAVEAARKALTRNKGKDWSKASGAVRARYLRAIAAKVTERKSELANLEAIDCGKPLDEAAWDMDDVAGCFEYYADLAQGLDAKQKAPLSLPLDTFKGYVLKEPIGVVGLITPWNYPLLMAVWKVAPALAAGCTAILKPSELASVTCLELADICREVGLPPGVLNILTGLGTEAGAPLASHPHVDKIVFTGSTATGSNIMTSAAKLVKPVSLELGGKSPIIVFDDVKIDKAVEWTMFGCFWTNGQICSATSRLLVHEKIADEFLDKLVKWTKNIKISDPFEEGCRLGPVVSKGQYERVVKFVSNARKEGATVLCGGARPGHLKKGYFVEPAIISNVTTSMEIWRDEVFGPVLCVKTFSTEDEAIQLANDSQYGLAGAVLSNDLERCDRVSKAFEAGIVWVNCSQPCFCQAPWGGTKRSGFGRELGEWGLGNYLSVKQVTQYISDEPWGWYKPPSKL

SEQ ID NO: 553 - DNA, 1530 bp, Brassica napus
  CDS (1)..(1530)
atgggttcagcgagcaaagagtatgagtttctgagcgagattgggttaagcagctctcacaaccttggaaactacatcggtggcaaatggctaggaaacggtcctcttgtttctactctgaatcctgctaacaatcagccaattgctcaagttgtggaagcttctcttgaagactacgagacaggtctcagagcttgtgaggaagcagctaagacatggatgcaggttcctgctcccaagagaggtgatattgtgagacaaattggggatgcgctgagatccaaacttgactatcttggccgtcttctttctcttgaaatgggaaagatccttgccgaaggcatcggtgaagttcaggaagtgattgacatgtgtgattttgctgttggtttgagccgacaactcaatggttcagtcattccttctgaacgcccaaaccatatgatgttggagatgtggaatcctcttggcattgtcggtgtcatcacagcgtttaacttcccttgtgcagttcttggctggaatgcttgcattgcactcgtctgcggaaactgtgtagtctggaaaggtgctccaactacaccgttgattaccatcgcaatgaccaaactagtggctgaagttctagagaagaatcatttacccggtgccatcttcactgccatgtgtggtggtgctgagattggtgaagcaatagccaaggacacacgcattcctctagtatcctttactggtagctccaaggtgggcttaacggtgcaacaaacagtgagtgctagatctggcaaaactctgcttgagttgagtggaaacaatgcgatcatagtcatggacgatgctgacattcagttagctgcacgttctgttctgtttgctgcggttggaaccgctggtcaacgctgcacaacttgccgtaggctgctattgcatgagagtgtgtatgacaaagtacttgagcaactcctgacttcatacaaacaagttaagatcggtgatcctctcgagaaagggacgttgttaggaccattacatactcctgaatcaaagaaaaactttgagaaaggaatcgaagtcatcaaatcccagggtggtagagtactaacgggaggtaaagcagttgacggtgaaggaaactttgtggagcctacgataatagagatatcatcagatgctgctgttgttaaagaagagctgtttgctccggttctatatgctctaaagtttaagacatttgaagaagctgttgcaataaacaactcagttcctcaaggtctaagcagctcgatattcacccgtagccccgagaacatcttcaagtggatcggaccaatgggaagtgactgtgggatagtgaatgtgaacataccgacgaatggagctgagataggaggagcttttggaggtgagaaagcgactggtggcggtcgtgaagctggtagtgactcttggaagcagtatatgcgccgttccacttgtactatcaactatgggaacgagttacctctggcacaaggaatcaacttcggttaa

SEQ ID NO: 554 - protein, 509 aa, Brassica napus
MGSASKEYEFLSEIGLSSSHNLGNYIGGKWLGNGPLVSTLNPANNQPIAQVVEASLEDYETGLRACEEAAKTWMQVPAPKRGDIVRQIGDALRSKLDYLGRLLSLEMGKILAEGIGEVQEVIDMCDFAVGLSRQLNGSVIPSERPNHMMLEMWNPLGIVGVITAFNFPCAVLGWNACIALVCGNCVVWKGAPTTPLITIAMTKLVAEVLEKNHLPGAIFTAMCGGAEIGEAIAKDTRIPLVSFTGSSKVGLTVQQTVSARSGKTLLELSGNNAIIVMDDADIQLAARSVLFAAVGTAGQRCTTCRRLLLHESVYDKVLEQLLTSYKQVKIGDPLEKGTLLGPLHTPESKKNFEKGIEVIKSQGGRVLTGGKAVDGEGNFVEPTIIEISSDAAVVKEELFAPVLYALKFKTFEEAVAINNSVPQGLSSSIFTRSPENIFKWIGPMGSDCGIVNVNIPTNGAEIGGAFGGEKATGGGREAGSDSWKQYMRRSTCTINYGNELPLAQGINFG

SEQ ID NO: 555 - DNA, 1491 bp, Brassica napus
  CDS (1)..(1491)
atggctgggactggaattttcacagagattctagacggagaagtctacaagtactactctgatggagagtggagaacttcttcctccggtaaaagtgtggccatcgttaaccctgccacgaggaagacacagtacaaggttcaagcatgcacgcaagaagaagtgaacaaggtgatggagatggctaaatctgctcagaagtcatgggcaaagactcctctttggaaaagagctgagcttcttcacaaagctgctgcgatcctcaaggacaacaaagctcccattgctgagtctcttgtcaaggaaattgctaaaccagccaaagattctgtcactgaggttgtgaggtctggagatttgatctcttattgtgctgaagaaggtgttaggatcttaggtgaagggaagtttctgctctctgatagcttccctgggaatgaacgtaccaagtactgcctcacttccaagatccctcttggtgtggttttggctattcctccattcaactatcctgtcaatctcgctgtatcgaagattgctcctgctttgatagctggaaactcccttgtcctgaaacctccaactcaaggagctgtttcttgccttcatatggtgtattgctttcacttagctggtttcccaaaaggtctcattagctgcatcacaggaaaaggctctgagattggagatttcctcactatgcaccctgctgttaactgcattagtttcaccgggggtgataccggaatctccatctccaagaaagctggtatgatccctcttcagatggaacttggaggaaaagatgcatgcattgtcctggaagatgctgatcttgatttagtcgcttccaatatcatcaaaggaggattctcctacagtgggcagagatgcactgcggttaaggtagtcttagtgatcgaatcagtggctgatgagcttgtagagaaagtgaaagctaaagtggcgaaactcacggtgggaccgcctgaagagaactgcgatattacagccgtggtgtcggaatcctcggctaatttcattgaaggattggtgatggatgctaaggagaaaggagcaacgttctgtcaagagtataaaagagaaggcaacttgatttggccgttgcttttggacaatgtcagaccagacatgaggattgcttgggaggaacctttcggtcctgtcttgcctgtcttgaggatcagttctgttgaggaaggcattaatcattgcaatgctagtaactttggcctccagggatgtgtattcactaaagacatcaacaaggcaatgctgatcagtgatgcaatggagacaggaacggttcagattaactctgcgccagctcgtggaccagaccatttccctttccagggactaaaggacagtggaataggatcacaaggtgtgacaaatagcatcaatctgatgaccaaagtgaagaccactgtcattaacttgcctacaccctcatactctatgggttag

SEQ ID NO: 556 - protein, 496 aa, Brassica napus
MAGTGIFTEILDGEVYKYYSDGEWRTSSSGKSVAIVNPATRKTQYKVQACTQEEVNKVMEMAKSAQKSWAKTPLWKRAELLHKAAAILKDNKAPIAESLVKEIAKPAKDSVTEVVRSGDLISYCAEEGVRILGEGKFLLSDSFPGNERTKYCLTSKIPLGVVLAIPPFNYPVNLAVSKIAPALIAGNSLVLKPPTQGAVSCLHMVYCFHLAGFPKGLISCITGKGSEIGDFLTMHPAVNCISFTGGDTGISISKKAGMIPLQMELGGKDACIVLEDADLDLVASNIIKGGFSYSGQRCTAVKVVLVIESVADELVEKVKAKVAKLTVGPPEENCDITAVVSESSANFIEGLVMDAKEKGATFCQEYKREGNLIWPLLLDNVRPDMRIAWEEPFGPVLPVLRISSVEEGINHCNASNFGLQGCVFTKDINKAMLISDAMETGTVQINSAPARGPDHFPFQGLKDSGIGSQGVTNSINLMTKVKTTVINLPTPSYSMG

SEQ ID NO: 557 - DNA, 1620 bp, Brassica napus
  CDS (1)..(1620)
atggcggctcgtagtagagtgtcttctctattgtcacgctccttttcagcttcctctccctttctctctcgttctcaaggaaaaaatttgaataatggaagtaggatcgtacggagatttggaacctcttctgcagctgaagaagtcataagcccatcggttcaagtttcttacacaaagctcctcatcgatgggaacttcgttgacgctgcttctggcaagacgttcccgactcttgatccacgcacaggggaagtcattgcgcacgtagctgaaggtgatgctgaagatatcaaccgggctgtgaaagctgcaaggaaggcctttgatgaaggaccttggcctaagatgactgcttatgaaaggtcgagggtaatgttgagattcgcagatttggttgagaaacacagcgaagagctcgcggctctagagtcatgggacaatgggaagacttatgaacaagcactaacagcagagattccaatggtcgccagattgttccgctactatgctgggtgggcggataagattcatgggcttacagttccagctgacggaaactatcatgttcagacactgcatgaacccataggtgttgctggacagatcattccatggaactttcctcttttgatgtttgcttggaaagttggtcctgctcttgcttgtggtaataccattgtcctcaaaaccgctgaacagactcctctcactgctttctacgtcggcaaacttttccttgaagcgggtcttcctcctggtgttctgaatatagtttctggattcggtgcaaccgctggtgcttctctcgcaagtcacatggatgtagacaagcttgctttcacaggatcgactgatactggtaaagttatacttggactggctgctaacagcaatctcaagccggtgactctggaacttggagggaagtcaccgttcatcgtattcgaagatgctgatattgataaagctgtggagcttgctcactttgctctcttctttaaccaggggcaatgttgctgcgcggggtctcggacatatgttcatgagaaagtgtatgatgagttcgttgagaaagcaaaggcacgcgctttaaaacgtgtggttggtgatcctttcaagaaaggcattgaacagggtcctcagatcgactcaaagcaattcgagaaagtgatgaagtacataaggtcaggagtggaaagcaatgctactcttgaatgtggtggtggtcaggttggagacagaggctacttcatccaacctacagtcttttctaatgttaaggacgacatgcttatcgctcaagacgagatttttggtccagtccagtccatcttgaagttcagtgatgttgatgaggtgataaagagggcgaacgacactaggtacgggctagccgcaggggttttcacaaagagcctggacactgcaaatagggtgtcgagggctttgaaagctggcaccgtttgggtcaactgtttcgatgtctttgacgcagccatcccctttggtggttacaagatgagcggcaacggcagagagaaaggtatttacagtctcaacaactacttgcaggtcaaggcagtcgtcactccccttaataaccctgcatggatctga

SEQ ID NO: 558 - protein, 539 aa, Brassica napus
MAARSRVSSLLSRSFSASSPFLSRSQGKNLNNGSRIVRRFGTSSAAEEVISPSVQVSYTKLLIDGNFVDAASGKTFPTLDPRTGEVIAHVAEGDAEDINRAVKAARKAFDEGPWPKMTAYERSRVMLRFADLVEKHSEELAALESWDNGKTYEQALTAEIPMVARLFRYYAGWADKIHGLTVPADGNYHVQTLHEPIGVAGQIIPWNFPLLMFAWKVGPALACGNTIVLKTAEQTPLTAFYVGKLFLEAGLPPGVLNIVSGFGATAGASLASHMDVDKLAFTGSTDTGKVILGLAANSNLKPVTLELGGKSPFIVFEDADIDKAVELAHFALFFNQGQCCCAGSRTYVHEKVYDEFVEKAKARALKRVVGDPFKKGIEQGPQIDSKQFEKVMKYIRSGVESNATLECGGGQVGDRGYFIQPTVFSNVKDDMLIAQDEIFGPVQSILKFSDVDEVIKRANDTRYGLAAGVFTKSLDTANRVSRALKAGTVWVNCFDVFDAAIPFGGYKMSGNGREKGIYSLNNYLQVKAVVTPLNNPAWI

SEQ ID NO: 559 - DNA, 1512 bp, Brassica napus
  CDS (1)..(1512)
atggcgattacggtgccgcgacggcagctcttcatcggcggtcaatggacagagccccttcgccgtcaaacactccctgttgtcaatcccgccacggaggacatcatcggttacatcccagctgcaacttctgaggatgtggagctcgcggtggaagctgctaggaaagcacttacaagaaaccaaggaaaggattggtctaaagcatccggggctgttcgtgccagatacttacgtgctattgcagctaaggtaacggagaggaagtctgagctagctaatcttgaggctattgactgcggtaaacctctagatgaagcagcatgggacatggatgatgttgctggatgttttgaatattatgctgacctagctgaaggcttagatgcaaagcagaaggctcctctttctcttcccttagatacttttaagggctacgttctcaaggaacccattggtgtagttgggctgattactccatggaattatccgttactgatggctgtttggaaagtcgctcctgcacttgctgctgggtgcacggcaatactgaaaccttctgagttggcctccgtgacatgtttggagctcgctgatatctgccgcgaggtgggtctgccacctggtgttcttaatattctgactggtttaggaactgaagcaggtgctccattggcatcgcatccacacgttgacaagattgttttcactggaagcacggcaactggaagcaacattatgacttctgctgccaaattggttaaacctgtttccttggagcttggtgggaaaagccctatcattgtctttgatgatgtcaaaattgacaaagctgtggaatggactatgtttggttgtttctggacaaacggtcagatttgcagtgcgacatctcgacttctcgtgcatgaaaagattgctgacgaatttttggacaagttggtaaagtggacaaagaacattaagatttcagatccttttgaagaaggctgtaggcttggtcctgttgtcagcaaaggacagtacgagagagtagtgaagtttgtctcaaacgctaggaaggaaggtgcaactgtcctctgcggaggagctcgtcctgggcatttaaaaaagggttattttgttgaacctgctataatttcaaatgtgactacttcaatggaaatctggagagatgaagtatttggtcctgttctctgtgtcaaaacattctccactgaggatgaggcaatacagctggcaaatgactcccaatatggattagcaggcgctgtattatcaaatgatctggagaggtgtgatcgcgttagtaaggcattcgaggcgggtattgtgtgggtcaactgttctcagccatgtttctgtcaagctccatggggtggaaccaaacgcagtggttttggccgtgaactaggagaatggggacttgggaactacttgagtgtgaagcaggtgacgcaatatatatctgatgaaccatggggatggtacaaacctccttccaagctttaa

SEQ ID NO: 560 - protein, 503 aa, Brassica napus
MAITVPRRQLFIGGQWTEPLRRQTLPVVNPATEDIIGYIPAATSEDVELAVEAARKALTRNQGKDWSKASGAVRARYLRAIAAKVTERKSELANLEAIDCGKPLDEAAWDMDDVAGCFEYYADLAEGLDAKQKAPLSLPLDTFKGYVLKEPIGVVGLITPWNYPLLMAVWKVAPALAAGCTAILKPSELASVTCLELADICREVGLPPGVLNILTGLGTEAGAPLASHPHVDKIVFTGSTATGSNIMTSAAKLVKPVSLELGGKSPIIVFDDVKIDKAVEWTMFGCFWTNGQICSATSRLLVHEKIADEFLDKLVKWTKNIKISDPFEEGCRLGPVVSKGQYERVVKFVSNARKEGATVLCGGARPGHLKKGYFVEPAIISNVTTSMEIWRDEVFGPVLCVKTFSTEDEAIQLANDSQYGLAGAVLSNDLERCDRVSKAFEAGIVWVNCSQPCFCQAPWGGTKRSGFGRELGEWGLGNYLSVKQVTQYISDEPWGWYKPPSKL

SEQ ID NO: 561 - DNA, 1530 bp, Brassica napus
  CDS (1)..(1530)
atgggttcagcgagcaaagagtatgagtttctgagtgagattgggttaagcagctctcacaaccttggaaactacgttggtggcaaatggctaggcaacggacctcttgtttctactctgaaccctgctaacaatcagccaattgctcaagtggttgaagcttctcttgaagactacgagataggtctcaaagcttgtgaggaagcagctaagacatggatgcaggttcctgctcccaagagaggtgatattgtgagacaaattggggatgcgctaagatccaaacttgactatcttggccgtcttctttctcttgaaatgggaaagatccttgctgaaggcatcggtgaagttcaggaagtgattgacatgtgtgattttgctgttggtttgagccgacaactcaatggttcagtcattccttcagaacgcccaaaccatatgatgttggagatgtggaatcctcttggcattgtcggtgtcatcacagcgtttaacttcccttgtgcagttcttggctggaatgcttgcattgcactcgtctgcggaaactgtgtagtctggaaaggtgctccaactacaccgttgattaccatcgcaatgaccaaactagtggctgaagttctagagaagaatcatttacccggtgccatcttcactgccatgtgtggtggtgctgagattggtgaagcaatagccaaagacacacgcattcctctagtatcctttactggtagctccaaggtgggcttaacggtgcaacaaacagtgagtgctagatctggcaaaactctgcttgagttgagtggaaacaatgcgatcatagtcatggacgatgctgacattcagttagctgcacgttctgttctgtttgctgcggttggaacagctggtcaacgctgcacaacttgccgtaggctgcttttgcatgagagtgtgtatgacaaagtacttgagcaactccttacttcatacaaacaagtcaagatcggtgatcctcttgagaaagggactttgttaggaccattacatactcctgaatcaaagaaaaactttgagaaagggattgaagtcatcaaatcccagggtggcaaagtactaacgggaggtaaagcagttgaaggtgaaggaaacttcgtggagcctacgataatagagatatcatcagatgctgctgttgttaaagaagagctctttgctccggttctatatgctctcaagtttaagacatttgaagaagctgttgcgataaataactcggttcctcaaggtctaagcagctctatattcactcgtagccccgagaacatcttcaagtggatcggaccaatgggaagtgactgtgggatagtgaatgtgaacataccgacgaatggagctgagataggaggagcttttggaggtgagaaagcgactggtggtggtcgtgaagctggtagtgactcttggaagcagtatatgcgccgttccacttgtactatcaactatgggaacgagttacctctggcacaaggaatcaacttcggttaa

SEQ ID NO: 562 - protein, 509 aa, Brassica napus
MGSASKEYEFLSEIGLSSSHNLGNYVGGKWLGNGPLVSTLNPANNQPIAQVVEASLEDYEIGLKACEEAAKTWMQVPAPKRGDIVRQIGDALRSKLDYLGRLLSLEMGKILAEGIGEVQEVIDMCDFAVGLSRQLNGSVIPSERPNHMMLEMWNPLGIVGVITAFNFPCAVLGWNACIALVCGNCVVWKGAPTTPLITIAMTKLVAEVLEKNHLPGAIFTAMCGGAEIGEAIAKDTRIPLVSFTGSSKVGLTVQQTVSARSGKTLLELSGNNAIIVMDDADIQLAARSVLFAAVGTAGQRCTTCRRLLLHESVYDKVLEQLLTSYKQVKIGDPLEKGTLLGPLHTPESKKNFEKGIEVIKSQGGKVLTGGKAVEGEGNFVEPTIIEISSDAAVVKEELFAPVLYALKFKTFEEAVAINNSVPQGLSSSIFTRSPENIFKWIGPMGSDCGIVNVNIPTNGAEIGGAFGGEKATGGGREAGSDSWKQYMRRSTCTINYGNELPLAQGINFG

SEQ ID NO: 563 - DNA, 1491 bp, Brassica napus
  CDS (1)..(1491)
atggctgggactggaattttcacagagattctagacggagaagtctacaagtactactctgatggagagtggagaacttcttcctccggtaaaagtgtggccatcgttaaccctgccacgaggaagacacagtacaaggttcaagcatgcacgcaagaagaagtgaacaaggtgatggagatggctaaatctgctcagaagtcatgggcaaagactcctctttggaaaagagctgagcttcttcacaaagctgctgcgatcctcaaggacaacaaagctcccattgctgagtctcttgtcaaggaaattgctaaaccagccaaagattctgtcactgaggttgtgaggtctggagatttgatctcttattgtgctgaagaaggtgttaggatcttaggtgaagggaagtttctgctctctgatagcttccctggtaatgaacgtaccaagtactgcctcacttccaagatccctctcggtgtggttttggctattcctccattcaactatcctgtcaatctcgctgtatcgaagatcgctcctgctttgatagctggaaactcccttgtcctgaaacctccaactcaaggagctgtttcttgccttcatatggtacattgctttcacttagccggtttcccaaaaggtctcattagctgcatcactggaaaaggctctgagattggcgatttcctcactatgcaccctgctgttaactgcattagtttcactggcggtgataccggaatctcaatctccaagaaagctggtatgatccctcttcagatggaacttggaggaaaagatgcatgcattgtcctggaagatgctgatcttgatttagtcgcttccaatatcatcaaaggaggattctcctacagtgggcagagatgcactgcggttaaggtagtcttagtgatggaatcagtggcggatgagcttgttgagaaagtgaaagctaaagtggctaaactcacggtgggaccacctgaggagaactgtgatattacagcggtggtgtctgaatcctcggctaatttcattgaaggattggtgatggatgctaaggagaaaggagcaacgttctgtcaagagtataaaagagaaggcaacttgatttggccgttgcttttggacaatgtcagaccggacatgaggattgcttgggaggaacctttcggtcctgtcttacccgtcttgaggatcaattctgttgaagaaggcattaatcattgcaatgctagtaactttggcctccagggatgtgtattcactaaagacatcaacaaggcaatgctgatcagtgatgcaatggagacaggaacggttcagattaactctgcgccagctcgtggaccagaccatttccctttccagggactaaaggacagtggaataggatcacaaggtgtgacaaatagcatcaatctgatgaccaaagtgaagaccactgtcattaacttgcctacaccctcatactctatgggttag

SEQ ID NO: 564 - protein, 496 aa, Brassica napus
MAGTGIFTEILDGEVYKYYSDGEWRTSSSGKSVAIVNPATRKTQYKVQACTQEEVNKVMEMAKSAQKSWAKTPLWKRAELLHKAAAILKDNKAPIAESLVKEIAKPAKDSVTEVVRSGDLISYCAEEGVRILGEGKFLLSDSFPGNERTKYCLTSKIPLGVVLAIPPFNYPVNLAVSKIAPALIAGNSLVLKPPTQGAVSCLHMVHCFHLAGFPKGLISCITGKGSEIGDFLTMHPAVNCISFTGGDTGISISKKAGMIPLQMELGGKDACIVLEDADLDLVASNIIKGGFSYSGQRCTAVKVVLVMESVADELVEKVKAKVAKLTVGPPEENCDITAVVSESSANFIEGLVMDAKEKGATFCQEYKREGNLIWPLLLDNVRPDMRIAWEEPFGPVLPVLRINSVEEGINHCNASNFGLQGCVFTKDINKAMLISDAMETGTVQINSAPARGPDHFPFQGLKDSGIGSQGVTNSINLMTKVKTTVINLPTPSYSMG

SEQ ID NO: 565 - DNA, 1554 bp, Glycine max
  CDS (1)..(1554)
atgaactccaatggttaccctgcttcctccttcaaaatccccaccgtcaagttcaccaagctcttcatcaatggacattttgttgattcactttcaggaggagaatttgagacaatagacccaagaaccggagaggtgattgcaaggattgcagagggaaccaaagaagacattgaccttgccgtcaaagcgtctcgtctggctttcgaccatggtccatggcctcgtatgcctgccgtagtacgttatcatttactacctccggttctctttttacaagaaacaagttttaatgaaagagcaagaattatgatgaaatgggctgacctaattgaccaacacgtagaagaaattgcagcactggatgccattgatgctggaaagttgtaccatatgcttaaggctattgaaattcctgcaacagcaaatactatacgttattatgctggtgctgctgataaaattcatggagaggtattaaagcccgcacgggagttccatgcatatactttacttgaaccagttggtgttgtgggacatatcattccttggaatttccctagcatcatgtttgtctccaaggttagcccttgcttggctgctggttgcacaatggtcctcaagcctgctgaacaaacacctctttcagctttgttttatgctcatctagctaaactggctggaattccagatggagtgctcaatgtagtccccggatttggcgcaactgcaggtgctgcaatatgctcagacatggacattgataaggtcagttttacaggttcaacagaagtagggcgtgaagtaatgcgtgctgcagctaacagtaatttgaaaccagtttcacttgaactaggaggcaagtcaccattcataatttttgatgatgcaaatctagataaagcggttgagcttgctctcatggccctagtatataacaagggagaagtttgtgctgcaggctcccgcgtatttgttcaggaagggatctatgatgaatttgataagaggttggtggagaaggcaaaagcttgggttgttggggatccctttgatcctaatgttcagcaagggcctcaggttgacaaaaagcaatttgaaaaaattctttcctacatcgagcatggaaaaagagaaggggccacccttttgacagggggcaaaagagtgggtaacaagggttactacattgagccaacaattttctctaatgttaaggaggacatgcttatagcacaagatgaaatattcggtcccgtgatagcactgatgaagtttaagacaattgaggaagcaattaaaagtgctaacaacagcagatatggcctagtagcaggtgttgtgaccaagagcttggacacagcaaacacaatgtcaaggtcaattcgtgcaggggttgtttggatcaactgttattttgccttcgaaaatgacattccttatggaggatgtaagatgagtggatttggaaaagattctggattggaagccctacacaagtacctacatgttaaatccgttgtaacacccatttacaattctccttggctttga

SEQ ID NO: 566 - protein, 517 aa, Glycine max
MNSNGYPASSFKIPTVKFTKLFINGHFVDSLSGGEFETIDPRTGEVIARIAEGTKEDIDLAVKASRLAFDHGPWPRMPAVVRYHLLPPVLFLQETSFNERARIMMKWADLIDQHVEEIAALDAIDAGKLYHMLKAIEIPATANTIRYYAGAADKIHGEVLKPAREFHAYTLLEPVGVVGHIIPWNFPSIMFVSKVSPCLAAGCTMVLKPAEQTPLSALFYAHLAKLAGIPDGVLNVVPGFGATAGAAICSDMDIDKVSFTGSTEVGREVMRAAANSNLKPVSLELGGKSPFIIFDDANLDKAVELALMALVYNKGEVCAAGSRVFVQEGIYDEFDKRLVEKAKAWVVGDPFDPNVQQGPQVDKKQFEKILSYIEHGKREGATLLTGGKRVGNKGYYIEPTIFSNVKEDMLIAQDEIFGPVIALMKFKTIEEAIKSANNSRYGLVAGVVTKSLDTANTMSRSIRAGVVWINCYFAFENDIPYGGCKMSGFGKDSGLEALHKYLHVKSVVTPIYNSPWL

SEQ ID NO: 567 - DNA, 1494 bp, Glycine max
  CDS (1)..(1494)
atggctgctgggactggactctttgcagagattttggatggagatgcgtacaagtactatgctgatggagagtggaagaaatctgcttctgggaaaagtgtttccatcatcaaccccactaccagaaagactcaatacaaagttcaagcttgttcacaagaggaggttaataaggtcatggacttagcaaaatctgcacaaaagttatgggcaaagaccccactatggaaacgtgctgagcttcttcacaaggcagctgctatccttaaagagcacaaaactccaattgcagagtgcctggtgaaagaaatagcaaagccagccaaagatgctgttatggaggttgtaagatctggggatctggtttcttacactgctgaagaaggtgtaaggattctgggagagggaaagttcttggtgtcggatagctttcctggaaatgaaaggacaaaatattgcctcacatccaagattccactaggagtgattttagccattccaccttttaactatcccgtcaatcttgctgtttccaaaattgctcctgccctgattgctggaaactcaattgtgctcaagcctccaactcagggagctgtttctgctttgcacatggttcactgctttcacttggctggttttcccaaaggcctaatcaactgtgtcactggaaaaggctcagaaattggtgatttccttacaatgcatccaggagtgaactgtataagctttactggtggtgatactggcattgcaatttcaaagaaggcaggcatgattcctctgcaaatggagttgggaggaaaagatgcctgcattgtacttgaagatgctgacctggatttggttgctgcaaacattataaagggaggcttttcatacagtggtcagagatgcactgctgttaaggttgtcctggtaatggagtccgttgccgatgctttggttgagaaggtgaaggctaaggtggcaaaactaactgttggaccaccagaggatgactgtgatatcaccccggttgtgtcagaatcatctgccaatttcattgaaggcctggtcttggatgctaaggagaaaggagcaacattctgccaggagtacaaaagagaaggcaatcttatttggcctttgctactggacaatgttaggccagacatgagaatcgcatgggaagagccatttggaccagttttaccagtaattaggatcaattcagttgaagaaggaatccatcattgcaatgctagcaactttggacttcagggatgtgtcttcacaaaggatgtcaacaaagcaataatgatcagtgatgcaatggaaacgggaacagttcagataaattccgccccggctcgtgggccagatcattttccctttcagggtataaaggacagtggcattggatctcaagggattaccaacagcataaacatgatgaccaaggtcaaaacgactgtgatcaacttacccagcccttcctatactatgggctag

SEQ ID NO: 568 - protein, 497 aa, Glycine max
MAAGTGLFAEILDGDAYKYYADGEWKKSASGKSVSIINPTTRKTQYKVQACSQEEVNKVMDLAKSAQKLWAKTPLWKRAELLHKAAAILKEHKTPIAECLVKEIAKPAKDAVMEVVRSGDLVSYTAEEGVRILGEGKFLVSDSFPGNERTKYCLTSKIPLGVILAIPPFNYPVNLAVSKIAPALIAGNSIVLKPPTQGAVSALHMVHCFHLAGFPKGLINCVTGKGSEIGDFLTMHPGVNCISFTGGDTGIAISKKAGMIPLQMELGGKDACIVLEDADLDLVAANIIKGGFSYSGQRCTAVKVVLVMESVADALVEKVKAKVAKLTVGPPEDDCDITPVVSESSANFIEGLVLDAKEKGATFCQEYKREGNLIWPLLLDNVRPDMRIAWEEPFGPVLPVIRINSVEEGIHHCNASNFGLQGCVFTKDVNKAIMISDAMETGTVQINSAPARGPDHFPFQGIKDSGIGSQGITNSINMMTKVKTTVINLPSPSYTMG

SEQ ID NO: 569 - DNA, 1623 bp, Glycine max
  CDS (1)..(1623)
atggcaactcgaagactttcattgctcctctctcgctctctatcttccacttcttttcaagctgcttctctacttcactcactagggagaaactctggcaagtggggaaactttaacagattcagcactgcagcagcagttgaggatttaatcactccacaagttccaataacatacactaagcatctgataaatggacaatttgtggatgctgcttcagggaaaacttttccaacatatgacccacgcacaggagaagtgattgctcaagttgctgaaggtgatgcagaagatatcaaccgtgcagtatcggcagctcgcaaggcctttgatgaaggaccttggccaaaattgactgcttatgaaagatgcaagataatactgcgctttgctgatttggttgagaaacacagcgatgaacttgcagctctcgagacatggaataacggaaagacttatgaacaggctgccaagactgaattaccaatgttcgtgcgtttatttcactattatgctggttgggcagacaaaattcatgggctgacagtgccagctgatggaaattatcatgtgcagacattgcatgaaccaattggtgtagcaggacaaatcataccttggaactttcctctcctcatgtttgcttggaaagttggaccagctcttgcatgtggaaatactgtcatccttaagactgctgaacaaacacctttaacagctctctatgtagcaaaactttttcatgaggctggtcttccaccaggtgttttgaatgtagtttctggctatggtccaactgctggtgcagctctagcaagtcatatggatgttgacaagctagcattcactggatctaccgagactggaaaagttgtgcttggattggctgcgcaaagcaatttgaagcctgtgacattggaacttggagggaaatcacctttcatagtgtgtgaggatgctgatgttgaccaggctgtagaacttgcgcactttgctttgttctttaatcaggggcaatgttgctgtgctgggtctcgtacctttgtacatgagcatatctatgatgagttcttggagaaagcaaaggctcgtgctttgaaacgtgttgttggggatcccttcaaaaagggtgtcgaacaaggacctcagattgatgtggaacaattccagaaggtccttaggtacataaagtccggtattgaaagcaaggccacccttgaatgtgggggtgaccaaattggctcaaagggcttctttgtccagcccactgtcttctcaaatgttcaggatgacatgttgatagcaaaagatgaaatatttggccctgtacaaaccatcttgaagttcaaggacatcgacgaagtaattcgaaggtcaaacgcaacgcactatggtctagctgcaggagttttcactaagaatgtgcacacagccaacactttgatgcgagcactgagggttggaacagtatggatcaattgctttgatgtttttgatgctgcaattccctttggagggtacaaaatgagcggcattggcagggagaagggtatctacagtctcaacaattacctgcaagtgaaagctgtggtttcaccagtgaagaaacctgcatggttgtga

SEQ ID NO: 570 - protein, 540 aa, Glycine max
MATRRLSLLLSRSLSSTSFQAASLLHSLGRNSGKWGNFNRFSTAAAVEDLITPQVPITYTKHLINGQFVDAASGKTFPTYDPRTGEVIAQVAEGDAEDINRAVSAARKAFDEGPWPKLTAYERCKIILRFADLVEKHSDELAALETWNNGKTYEQAAKTELPMFVRLFHYYAGWADKIHGLTVPADGNYHVQTLHEPIGVAGQIIPWNFPLLMFAWKVGPALACGNTVILKTAEQTPLTALYVAKLFHEAGLPPGVLNVVSGYGPTAGAALASHMDVDKLAFTGSTETGKVVLGLAAQSNLKPVTLELGGKSPFIVCEDADVDQAVELAHFALFFNQGQCCCAGSRTFVHEHIYDEFLEKAKARALKRVVGDPFKKGVEQGPQIDVEQFQKVLRYIKSGIESKATLECGGDQIGSKGFFVQPTVFSNVQDDMLIAKDEIFGPVQTILKFKDIDEVIRRSNATHYGLAAGVFTKNVHTANTLMRALRVGTVWINCFDVFDAAIPFGGYKMSGIGREKGIYSLNNYLQVKAVVSPVKKPAWL

SEQ ID NO: 571 - DNA, 1515 bp, Glycine max
  CDS (1)..(1515)
atgagtgctctctctaactccagtagtagccacggcaattccttcctcaagatgcccgccatcaagtttaccaagctcttcatcaatggagattttgttgattccatatcaggaaggacatttgagactatagaccccagaaaagaagaggtaattgcaagagttagtgagggagataaagaagacattgatattgctgttaaagcagcacgtcaggcatttgactcgggtccatggcctcgcttgccaggctctgaaagggcaaaaattatgatgaaatgggcagacctagttgatgaaaatatagaagaactagcagcattagataccattgatgctggaaagctatactatattaataaggtagcggaaattccttcagctacaaatgcgttacggtactatgcaggtgctgctgataaaattcacggtgacgtattaaaaatgaacggggatttccatgcatatacacttttggaaccaattggtgttgtgggacacataattccatggaatgcccccagcctctcatttttcatcaaggttagcccttccttagctgcaggctgtactatggtcctcaaacctgctgaacaaacacccctctctgctttgttttatgctcatctagctaagttggctggaatcccagatggtgtgcttaatatagtacctggatttggcccaactgctggcgcagcaataagctcacacatggacatagatgcggtcagttttactggttcaattgaagtagggcgtgaagtgttgcaggctgcagcttggagcaatttaaaaccggtttcacttgaattaggaggcaagtctcctctcattattttcaatgatgcggatatagacaaagcttccgagcttgctctctttggcatcatgtctaacaagggagaaatttgtgtggcaggttctcgtgtgtttgtccaggaagagatctatgatgaatttgagaagaagttggtggagaaggcaaaatcttgggtcgttggggatccttttgatcccaaatcgctgcaagggcctcaggctgacaggaaccaattggagaaaatactttcatatattgagcacggaaagagagaaggagccacccttttgacaggaggtaatacagtgggcaacaaaggttactacatagaacctacaattttctccaatgtaaaggaggacatgctaatagcacgggatgaaatatttggccctgtactagcgctgatgaagtttaagaccatggaggaagcaattaaaagtgctaacaataccaagtatggcctagcagcaggaattgtaaccaagaatttggatactgcaaacactatgtcaaggtccattcgtgcaggcattgtttggatcaactgctattttaccgtagggagtgatgttccttttggagggtataagatgagcggatttggaagagatttgggattacaggcccttcacaagtacttacaagttaaatctgttgtaacacctattcataattctccttggctttga

SEQ ID NO: 572 - protein, 504 aa, Glycine max
MSALSNSSSSHGNSFLKMPAIKFTKLFINGDFVDSISGRTFETIDPRKEEVIARVSEGDKEDIDIAVKAARQAFDSGPWPRLPGSERAKIMMKWADLVDENIEELAALDTIDAGKLYYINKVAEIPSATNALRYYAGAADKIHGDVLKMNGDFHAYTLLEPIGVVGHIIPWNAPSLSFFIKVSPSLAAGCTMVLKPAEQTPLSALFYAHLAKLAGIPDGVLNIVPGFGPTAGAAISSHMDIDAVSFTGSIEVGREVLQAAAWSNLKPVSLELGGKSPLIIFNDADIDKASELALFGIMSNKGEICVAGSRVFVQEEIYDEFEKKLVEKAKSWVVGDPFDPKSLQGPQADRNQLEKILSYIEHGKREGATLLTGGNTVGNKGYYIEPTIFSNVKEDMLIARDEIFGPVLALMKFKTMEEAIKSANNTKYGLAAGIVTKNLDTANTMSRSIRAGIVWINCYFTVGSDVPFGGYKMSGFGRDLGLQALHKYLQVKSVVTPIHNSPWL

SEQ ID NO: 573 - DNA, 1506 bp, Glycine max
  CDS (1)..(1506)
atgactagccttactaatggcgatgctgcctccctcaacaaggtccccacgatcaacttcaccaagctcttcattaacggacacttcgttcactctctgtcaggaaagacatttgagacaatagatccaagaacaggagatgttatagcgaggataagcgagggagataaagaagacattgacattgctgttaaagcagcacgtcatgcatttgacaacggtccatggcctcgccttcccggctctgagagagcaagaatattgctgaaatgggcagaaataatagaggaaaacgcagaagaacttgcagcactagatgccattgatgcggggaagttgtaccatatgtgtaggaatttggaagttccagcagcagcaaacactcttcgttactatgcaggtgcagccgataagattcatggagaggtgttgaaaatgtcccgagacttccatgcctatacattacttgaaccacttggtgttgtgggacacattactccctggaatttccccaataccatgttctacatcaaggttgctccttctttagctgctggctgcaccatggtcctcaagcccgccgagcaaacacccctctctgctttgttttctgctcatcttgctaaattggctggaatcccagatggagtgatcaatgtagtgcctggatttggcccaactgctggtgctgcattaagctcacacatggatgttgataaggtcagctttaccggttcaacacaaacaggccgtgtgataatgcaggctgcagcaaagagtaacttgaaacaagtttcacttgaattaggaggcaagtcacccctcataatttttgatgatgcagatatagacaaagctactgagctagctctactaggcatcctatataacaagggagaagtttgtgttgcaagttcccgtgtgcttgttcaagaagggatctatgatgaatttgagaaaaaactggtggagaaggcaaaagcttgggtcgttggggatccctttgatcctaaagttcaacaaggccctcaggttgacaaggaacaatttgaaaaggtcctttcatatattgagcatggaaagaaagaaggagctacccttttgaccgggggtaaaacagtgggaaacaagggctactttattgagccaacaattttctccaatataagggaggatatgcttatagcacaggatgaaatatttggcccagtaatggcactgaagaagtttaagaccattgaggaagcaattaagagtgctaacaataccaagtatggcctagcagcaggcatagtgaccaagaatttggatacggcaaacacagtgtcaaggtccattcgtgcaggcactatttggatcaactgctattttgcctttggcgatgatgttccctttggagggtataagatgagtggatttggaaaagatcatggattggaagcccttcacaagtacctacaagttaaatctgttgttactcccctttacaattcaccctggctttga

SEQ ID NO: 574 - protein, 501 aa, Glycine max
MTSLTNGDAASLNKVPTINFTKLFINGHFVHSLSGKTFETIDPRTGDVIARISEGDKEDIDIAVKAARHAFDNGPWPRLPGSERARILLKWAEIIEENAEELAALDAIDAGKLYHMCRNLEVPAAANTLRYYAGAADKIHGEVLKMSRDFHAYTLLEPLGVVGHITPWNFPNTMFYIKVAPSLAAGCTMVLKPAEQTPLSALFSAHLAKLAGIPDGVINVVPGFGPTAGAALSSHMDVDKVSFTGSTQTGRVIMQAAAKSNLKQVSLELGGKSPLIIFDDADIDKATELALLGILYNKGEVCVASSRVLVQEGIYDEFEKKLVEKAKAWVVGDPFDPKVQQGPQVDKEQFEKVLSYIEHGKKEGATLLTGGKTVGNKGYFIEPTIFSNIREDMLIAQDEIFGPVMALKKFKTIEEAIKSANNTKYGLAAGIVTKNLDTANTVSRSIRAGTIWINCYFAFGDDVPFGGYKMSGFGKDHGLEALHKYLQVKSVVTPLYNSPWL

SEQ ID NO: 575 - DNA, 1500 bp, Glycine max
  CDS (1)..(1500)
atgaactccaatggttaccctgcttcctccttcaaaatccccaccgtcaagttcaccaagctcttcatcaatggacattttgttgattcactttcaggaggagaatttgagacaatagacccaagaaccggagaggtgattgcaaggattgcagagggaaccaaagaagacattgaccttgccgtcaaagcgtctcgtctggctttcgaccatggtccatggcctcgtatgcctgccgtagaaagagcaagaattatgatgaaatgggctgacctaattgaccaacacgtagaagaaattgcagcactggatgccattgatgctggaaagttgtaccatatgcttaaggctattgaaattcctgcaacagcaaatactatacgttattatgctggtgctgctgataaaattcatggagaggtattaaagccggcacgggagttccatgcatatactttactagaaccaattggtgttgtgggacacattattccttggaatttccctagcaccatgtttgttgccaaggtgagtccttccttggctgctggttgcacaatggtcctcaagcctgctgaacaaacacctctctcggccttgttttatgctcatcttgctaagctggctggaattccagatggagtgcttaatgtagtacccggatttggccaaactgcaggtgctgcaataagctcacacatggacattgataaggtaagctttacgggttcaacagaagtggggcgtgaagtaatgcgtgctgcagctaatagtaatttgaaaccagtttcacttgagctaggaggcaagtcacccgtcatagtttttgatgatgctgatgtagataaagctgctggacttgctctcatgggcatcctatttaataagggagaaatttgtgttgcaggctcccgtgtgttggttcaggaaggaatctatgatgaatttgagaagaaattggtggaaaaagcaaatgcttgggtggttggtgatccttttgatcctaaagttcagcaagggcctcaggttgacaagaagcaatttgaaaagattctttcctatatcgagcatggaaagaaagaaggtgcaacccttttgacagggggcaaaagagtgggcaacaagggttactacattgagcctacaattttctctaatgttaaggaggacatgcttatagtacaagatgaaatatttggccctgtgatggctttgatgaagtttaagactattgaagatgcaattaagattgccaacaatacaaggtatggcctagcatcaggcattgtgacaaagagtttggacacagccaacactgtgtcaaggtccattcgtgcaggcattgtttggatcaactgttattttgcctttggggatgacattccttatggggggtacaagatgagtggatttggaagagattttggaatggaagccctacacaagtatcttcaagttaaatctgttgtaactcccatttacaattctccctggctttga

SEQ ID NO: 576 - protein, 499 aa, Glycine max
MNSNGYPASSFKIPTVKFTKLFINGHFVDSLSGGEFETIDPRTGEVIARIAEGTKEDIDLAVKASRLAFDHGPWPRMPAVERARIMMKWADLIDQHVEEIAALDAIDAGKLYHMLKAIEIPATANTIRYYAGAADKIHGEVLKPAREFHAYTLLEPIGVVGHIIPWNFPSTMFVAKVSPSLAAGCTMVLKPAEQTPLSALFYAHLAKLAGIPDGVLNVVPGFGQTAGAAISSHMDIDKVSFTGSTEVGREVMRAAANSNLKPVSLELGGKSPVIVFDDADVDKAAGLALMGILFNKGEICVAGSRVLVQEGIYDEFEKKLVEKANAWVVGDPFDPKVQQGPQVDKKQFEKILSYIEHGKKEGATLLTGGKRVGNKGYYIEPTIFSNVKEDMLIVQDEIFGPVMALMKFKTIEDAIKIANNTRYGLASGIVTKSLDTANTVSRSIRAGIVWINCYFAFGDDIPYGGYKMSGFGRDFGMEALHKYLQVKSVVTPIYNSPWL

SEQ ID NO: 577 - DNA, 1512 bp, Glycine max
  CDS (1)..(1512)
atgagcatcccaattccccatcggcagttattcatagacggagactggaaagtccccgtcctcaagaatcggattcccatcatcaacccttccacccaacacatcatcggggatatcccagcagctactaaggaagacgttgatctcgctgtcgctgccgccaaagctgccctctcccgcaacaagggcgccgattgggcctccgcttccggctccgttcgggctcgctacctccgcgccatcgctgccaagatcaccgagaaaaagcctgaactagcaaaactcgaagctattgactgtggaaaaccgctcgatgaagccgcctgggacatcgacgatgttgctggttgctttgagttctatgctgaccttgctgaaaaattggacgcacagcaaaaggctcatgtgtctcttcccatggacacattcaagagttatgttcttaaggagccgattggagtcgttgctttaataactccttggaattatcctctgttgatggctacgtggaaggttgctcctgctctggcggccggctgtgctgcaatattgaagccctctgagttggcatctgtgacatgtttggagctcgctgaaatttgcaaagaagtcgggcttcctcctggcgtgttgaacattctcactggattaggacctgaagcgggtgctcctttagcagctcatcccgatgtagacaagattgcctttactggaagctctgcaactgggagcaaaattatgacagctgcagctcagctgatcaagcctgtttcactagagcttggtgggaaaagcccaatcattgtttttgaggatgttgaccttgacaaggctgctgaatggaccatatttggttgcttctggacaaatggtcagatatgcagtgcaacttcccgccttattgtacatgaaagtatagcaacagaatttttgaataggattgtgaaatgggtcaaaaacatcaaaatttctgatcccttggaagaaggttgcagactaggccctattgttagtgaaggacagtatgaaaagatattgaagtttatctcaaatgctaagagtgagggtgcaaccattttgactggtgggtctcgcccagagcatctaaagaagggattctttgttgaaccaactgtcataactgatgtaactacctccatgcaaatttggagagaagaagtatttggaccagttctctgtgtaaaaacatttagcactgaggaagaagctattgatctagcaaatgacactgtatatggcttgggttctgctgtaatatcaaatgatctagaaagatgtgagcgcattactaaggcttttaaggctggaattgtgtggattaattgctctcaaccatgcttcactcaagccccatggggaggcattaaacgcagtggttttggtcgtgaattaggagaatggggacttgataattacttgagtgtgaagcaagtgacccaatatatctctgatgaaccgtggggctggtaccagtctccttcaaggctgtga

SEQ ID NO: 578 - protein, 503 aa, Glycine max
MSIPIPHRQLFIDGDWKVPVLKNRIPIINPSTQHIIGDIPAATKEDVDLAVAAAKAALSRNKGADWASASGSVRARYLRAIAAKITEKKPELAKLEAIDCGKPLDEAAWDIDDVAGCFEFYADLAEKLDAQQKAHVSLPMDTFKSYVLKEPIGVVALITPWNYPLLMATWKVAPALAAGCAAILKPSELASVTCLELAEICKEVGLPPGVLNILTGLGPEAGAPLAAHPDVDKIAFTGSSATGSKIMTAAAQLIKPVSLELGGKSPIIVFEDVDLDKAAEWTIFGCFWTNGQICSATSRLIVHESIATEFLNRIVKWVKNIKISDPLEEGCRLGPIVSEGQYEKILKFISNAKSEGATILTGGSRPEHLKKGFFVEPTVITDVTTSMQIWREEVFGPVLCVKTFSTEEEAIDLANDTVYGLGSAVISNDLERCERITKAFKAGIVWINCSQPCFTQAPWGGIKRSGFGRELGEWGLDNYLSVKQVTQYISDEPWGWYQSPSRL

SEQ ID NO: 579 - DNA, 1518 bp, Glycine max
  CDS (1)..(1518)
atgagttccctctctaataactctagtagtagccacggcaattccttcctccagatgccccccatcaagtttaccaagctcttcatcaatggagatttcgttgattccttatctggaaggacatttgagactatagaccccagaacagaagaggtaattgcaagagttagtgagggagataaagaagatattgatattgctgttaaagcagcacgtcaggcatttgactcaggtccatggcctcgcttgcccgcctctgaaagggcaaaaattatgatgaaatgggcagacctaattgatgaaaacatagaagaactagcagcattagataccgttgatgctggcaagctgaactatattaataaggttgtggaaattccttcagctacaaatgcgttacgatactatgcaggtgcggctgataaaattcatggtgaagtattaaaaatgaatggggattttcatgcatatacacttttggaaccaattggtgttgtgggacacataattccatggaatgcccccagcctctcattcatcatcaaggttagcccttccttagctgcaggctgtactatggtcctcaaacctgctgaacaaacacccctctctgcgtggtgttatgctcatataactaaggtggctggaatcccagatggtgtgcttaatatagtacctggatttggcccaactgctggcgcagcaataagctcacacatggacatagatgcggtcagttttactggttcaattgaagtagggcgtgaagtgatgcaggctgcagctaggagcaatttaaaaccagtttcacttgaattaggaggcaagtctcctctcattattttcaatgacgcggatatagacaaagctgcccagcttgctctctttggcatcatgtctaacaagggagaaatttgtgtggcaagttctcgggtgtttgtccaggaagagatctatgatgaatttgagaagaagttggtggagaaggcaaaatcttgggtcgttggggatccttttgatcccaaatccctgcaagggcctcaggctgacaggaaccaattggagaaaatactctcctatattgaacacggaaagagagaaggagctacccttttgaccggaggtaatacagtgggcaacaaaggttactacatagaacctacaattttctgtaatgtaaaggaggacatgcttatagcacgagatgaaatatttggccctgtactagcgctgatgaaatttaagaccatggaggaagcaattaaaagtgctaacaacaccaagtatggcctagcagcaggaattgtgaccaagaatttggatactgcaaacactatgtcaaggtccattcgtgcaggcattgtttggatcaactgctatttaaccgtagggagtgacgttccttttggagggtataagatgagtggatttggaagagatttgggattgcaggcccttcataagtacttacaagttaaatctgttgtaacacctattcacaattctccttggctttga

SEQ ID NO: 580 - protein, 505 aa, Glycine max
MSSLSNNSSSSHGNSFLQMPPIKFTKLFINGDFVDSLSGRTFETIDPRTEEVIARVSEGDKEDIDIAVKAARQAFDSGPWPRLPASERAKIMMKWADLIDENIEELAALDTVDAGKLNYINKVVEIPSATNALRYYAGAADKIHGEVLKMNGDFHAYTLLEPIGVVGHIIPWNAPSLSFIIKVSPSLAAGCTMVLKPAEQTPLSAWCYAHITKVAGIPDGVLNIVPGFGPTAGAAISSHMDIDAVSFTGSIEVGREVMQAAARSNLKPVSLELGGKSPLIIFNDADIDKAAQLALFGIMSNKGEICVASSRVFVQEEIYDEFEKKLVEKAKSWVVGDPFDPKSLQGPQADRNQLEKILSYIEHGKREGATLLTGGNTVGNKGYYIEPTIFCNVKEDMLIARDEIFGPVLALMKFKTMEEAIKSANNTKYGLAAGIVTKNLDTANTMSRSIRAGIVWINCYLTVGSDVPFGGYKMSGFGRDLGLQALHKYLQVKSVVTPIHNSPWL

SEQ ID NO: 581 - DNA, 1611 bp, Glycine max
  CDS (1)..(1611)
atggcttcttcactcagaatttcaagactcatctctcgctccttttcttctacctccttcttttcacgaggtgggaatggtttccttggttcaagacactgcaaatacagcacttcttctgccattgaagaagaacccgttaaaccatcagtgcaagtagaacacacccaactcttaattgatggaaaatttgtagatgctgcttctggtaaaacttttccaactttagatcctaggacaggtgaagtaattgctcatgttgctgagggtcactctgaggatgttgatcgagcagttgcagctgcacgaaaagcatttgatcatggaccatggcctaagatgacggcttatgaacggcaaaggatcttgttgcgcgcggccgatctgatcgagaagcataatgatgagcttgcagcacttgagacttgggataatggaaagccttatgaacaagctgctaagattgaagttccaatgcttgttcgcctgattcgatactatgctggttgggcagataagattcatggtctaacagttccagctgatggaccttatcatgtgcaaacattgcacgaaccgattgatgttgccggtcagatcattccatggaacttccctcttctcatgtttgcctggaaggttggaccggcattggcctgtggcaacaccattgttctcaaaacagctgagcagacaccattatctgctttatatgcagcaaaactatttcatgaggctggacttcctgctggtgttttgaatgtagtttccggctttggtccaactgctggtgctgctcttgctagtcacatggaggttgataagcttgcttttaccggttccactgatactgggaaagttgtccttgaactggcggctaaaagcaatcttaagcctgttactttggagcttggtgggaaatctccctttatagtgtgtgaagacgctgatgtagatcaggctgttgagctcgcacacttcgccttattctttaatcacggacaatgttgctgtgctgggtctcgaacatttgtacatgaaaatgtatacgaggagtttgttcagaaagcaaaggctcgtgctttgagacgtgttgttggtgatccattcaaggggggaatagagcaaggtcctcagattgattcagaccaatttgagaaaatactgaggtacatcagatccggtgttgaaagcggggcaacccttgaaacaggaggagacaagcttggcaacaagggcttctacattcaacctacagtcttctcaaatgttaaggatggcatgctgattgcaaaggatgagatctttggtccagtccaatccatattaaaattcaaggaccttggtgaggtagttcaaagagcgaacaacacacgttacgggcttgcggcaggagtgttcacaaagaacatggacactgcaaacactttgacgcgggcactgagagttggaacagtttggataaactgctttgacacatttgatgctgcaattccctttggagggtacaaaatgagtggtcaaggcagagaaaaaggagagtatagtctcaaaaactacttgcaagtgaaggctgtcgttaatcccttgaagaacccagcatggctttga

SEQ ID NO: 582 - protein, 536 aa, Glycine max
MASSLRISRLISRSFSSTSFFSRGGNGFLGSRHCKYSTSSAIEEEPVKPSVQVEHTQLLIDGKFVDAASGKTFPTLDPRTGEVIAHVAEGHSEDVDRAVAAARKAFDHGPWPKMTAYERQRILLRAADLIEKHNDELAALETWDNGKPYEQAAKIEVPMLVRLIRYYAGWADKIHGLTVPADGPYHVQTLHEPIDVAGQIIPWNFPLLMFAWKVGPALACGNTIVLKTAEQTPLSALYAAKLFHEAGLPAGVLNVVSGFGPTAGAALASHMEVDKLAFTGSTDTGKVVLELAAKSNLKPVTLELGGKSPFIVCEDADVDQAVELAHFALFFNHGQCCCAGSRTFVHENVYEEFVQKAKARALRRVVGDPFKGGIEQGPQIDSDQFEKILRYIRSGVESGATLETGGDKLGNKGFYIQPTVFSNVKDGMLIAKDEIFGPVQSILKFKDLGEVVQRANNTRYGLAAGVFTKNMDTANTLTRALRVGTVWINCFDTFDAAIPFGGYKMSGQGREKGEYSLKNYLQVKAVVNPLKNPAWL

SEQ ID NO: 583 - DNA, 1506 bp, Glycine max
  CDS (1)..(1506)
atgactagccttactaatggcgatgctggctccctcaacaaggtccccacgatcaagttcaccaagctcttcattaatggagacttcgttgactctctgtcaggaaagacatttgagacaatagatccaagaacaggagatgttatagcgaggataagcgagggagataaagaagacattgacattgctgttaaagcagcacgtcatgcatttgacaacggtccatggcctcgccttcccggctctgagagagcaagaatattgctgaaatgggcagaaataattgaggaaaacgcagaagaacttgcagcactagatgcgattgatgcggggaagttgtaccatatgtgtaggaatgtggaagttccagcagcggcaaacactcttcgttactatgctggtgcagccgataagattcatggagaggtgttgaaaatgtcccgagagttccatgcctatacattacttgaaccacttggtgttgtgggacacattactccctggaatttccccaataccatgttctacatcaaagtcgctccttctttagctgctggctgcaccatggtcctcaagcccgctgagcaaacacccctctctgctttgttttctgctcatcttgctaaattggctggaatcccagatggagtgatcaatgtagtgcctggatttggcccaactgctggtgctgcattaagctcacacatggatgttgataaggtcagctttaccggttcaacacaaacaggccgtgtgataatgcaggctgcagcaaagagtaacttgaaacaagtttcacttgaattaggaggcaagtcacccctcataatttttgatgatgcagatatagacaaagctactgagctagctctactaggcatcctatataacaagggagaagtttgtgttgcaagttcccgtgtgcttgttcaagaagggatctatgatgaatttgagaaaaaactggtggagaaggcaaaagcttgggtcgttggggatccctttgatcctaaagttcaacaaggccctcaggttgacaaggaacaatttgaaaaggtcctttcatatattgagcatggaaagaaagaaggagctacccttttgactgggggtaaaacagtgggaaacaagggctactttattgagccaacaattttctccaatataagggaggatatgcttatagcacaggatgaaatatttggcccagtaatggcactgaagaagtttaagaccattgaggaagcaattaagagtgctaacaataccaagtatggcctagcagcaggcatagtgaccaagaatttggatacggcaaacacagtgtcaaggtccattcgtgcaggcactatttggatcaactgctattttgcctttggcgatgatgttccctttggagggtataagatgagtggatttggaaaagatcatggattggaagcccttcacaagtacctacaagttaaatctgttgttactcccctttacaattcaccctggctttga

SEQ ID NO: 584 - protein, 501 aa, Glycine max
MTSLTNGDAGSLNKVPTIKFTKLFINGDFVDSLSGKTFETIDPRTGDVIARISEGDKEDIDIAVKAARHAFDNGPWPRLPGSERARILLKWAEIIEENAEELAALDAIDAGKLYHMCRNVEVPAAANTLRYYAGAADKIHGEVLKMSREFHAYTLLEPLGVVGHITPWNFPNTMFYIKVAPSLAAGCTMVLKPAEQTPLSALFSAHLAKLAGIPDGVINVVPGFGPTAGAALSSHMDVDKVSFTGSTQTGRVIMQAAAKSNLKQVSLELGGKSPLIIFDDADIDKATELALLGILYNKGEVCVASSRVLVQEGIYDEFEKKLVEKAKAWVVGDPFDPKVQQGPQVDKEQFEKVLSYIEHGKKEGATLLTGGKTVGNKGYFIEPTIFSNIREDMLIAQDEIFGPVMALKKFKTIEEAIKSANNTKYGLAAGIVTKNLDTANTVSRSIRAGTIWINCYFAFGDDVPFGGYKMSGFGKDHGLEALHKYLQVKSVVTPLYNSPWL

SEQ ID NO: 585 - DNA, 1614 bp, Glycine max
  CDS (1)..(1614)
atggcagcattgaacctttgccgcatggcacttcgatcctcgaagcttctctctcgcccttatcatcgtctttctgttcagttgcagatgcagatgcagccctcttctcctccactcactcgaaagatgagcatggatgcacagagtgttgcttctcagcttaatagttctggattgttgaggactcagggccttattggagggaaatggagtgatgcttatgatggcaaaaccataaaggtttataatccagcaactggtgaatctattgtagatgttgcatgcatgggtggaagagagacaaatgatgcaatttctgcagcctatgatgcatatggatcatggagcaaaaccactgccgctgaacgaagcaaatttctgaggaaatggtatgatttgctaatggtacataaagaagaacttgcacagcttataaccttggagcaggggaaacctcttaaagagtctgttggtgagataaactatggggctggctttattgagtttgcagctgaggaggcaaaacgtatatatggggatataattcctgcacctctatctgatcggcgattatttgttctaaagcagcctgtaggggttgtaggtgcaattacaccttggaactttccccttgctatgattactcgaaaggttggtccagcccttgcatgtggctgtacagtggtcataaagccctctgaacttacgcctctcaccgctttagctgcagcggaactctccattcaagctggaataccaccgggtgtcgtgaatgtggtaatgggaaatgctcctgatattggggacgctttacttgcaagtccacaggtaaggaagatcacattcacaggctcgacggctgttgggaagaaattgatggctggttcagctgaaacagttaaaaaagtatctcttgaactcggcggcaatgcaccttgcatagtttttgatgatgctgacctggatgttgcagtaaaaggaactcttgcagcaaagttccgtaacagtggacaaacatgtgtttgtgcaaatagaattattgtgcaagaaggtatatatgagaagtttgcaaatgctttacgtgatactgttcagaatatgaaagttggggatggtttcagtgaaggtgtggcacagggtcctctaatcaatgaagctgctgtcaaaaaggttgagtccttaattcatgatgctacatcaaagggggcaaaagtaattcttgggggtaaaagacatagccttggatttactttttatgaacccacggtcatcagtgatgtcaacagtgatatgcgcatatcaagagaggaagcatttggacctgttgcaccccttttgagattcaaaactgaagaggatgctatcagaattgctaacgacactaatgcaggtttgggttcatacatatttacaaacagtatccaacgatcatggcgtgttgctgaggctctagaatatggacttgtgggtgttaatgaaggagtaatttcaactgaggtggctccattcggtggttttaaacagtccggcctcggaagagaaggctccaaatatgggatggatgaatatttagagatcaagtatgtttgcttgggaaacatgcacaaagcttga

SEQ ID NO: 586 - protein, 537 aa, Glycine max
MAALNLCRMALRSSKLLSRPYHRLSVQLQMQMQPSSPPLTRKMSMDAQSVASQLNSSGLLRTQGLIGGKWSDAYDGKTIKVYNPATGESIVDVACMGGRETNDAISAAYDAYGSWSKTTAAERSKFLRKWYDLLMVHKEELAQLITLEQGKPLKESVGEINYGAGFIEFAAEEAKRIYGDIIPAPLSDRRLFVLKQPVGVVGAITPWNFPLAMITRKVGPALACGCTVVIKPSELTPLTALAAAELSIQAGIPPGVVNVVMGNAPDIGDALLASPQVRKITFTGSTAVGKKLMAGSAETVKKVSLELGGNAPCIVFDDADLDVAVKGTLAAKFRNSGQTCVCANRIIVQEGIYEKFANALRDTVQNMKVGDGFSEGVAQGPLINEAAVKKVESLIHDATSKGAKVILGGKRHSLGFTFYEPTVISDVNSDMRISREEAFGPVAPLLRFKTEEDAIRIANDTNAGLGSYIFTNSIQRSWRVAEALEYGLVGVNEGVISTEVAPFGGFKQSGLGREGSKYGMDEYLEIKYVCLGNMHKA

SEQ ID NO: 587 - DNA, 1611 bp, Glycine max
  CDS (1)..(1611)
atggcttcttcactcagaatttcaagactcatctctcgctccttttcttctacctccttcttttcacgaggtgggaatggtttccttggttcaagacactgcaaatacagcacttcttctgccattgaagaagaacccgttaaaccatcagtgcaagtagaacacacccaactcttaattgatggaaaatttgtagatgctgcttctggtaaaacttttccaactttagatcctaggacaggtgaagtaattgctcatgttgctgagggtcactctgaggatgttgatcgagcagttgcagctgcacgaaaagcatttgatcatggaccatggcctaagatgacggcttatgaacggcaaaggatcttgttgcgcgtggccgatctgctcgagaagcataatgatgagcttgcagcacttgagacttgggataatggaaagccttatgaacaagctgctaagattgaagttccaatgcttgttcgcctgattcgatactatgctggttgggcagataagattcatggtctaacagttccagctgatggaccttatcatgtgcaaacattgcacgaaccgattgatgttgccggtcagatcattccatggaacttccctcttctcatgtttgcctggaaggttggaccggcattggcctgtggcaacaccattgttctcaaaacagctgagcagacaccattatctgctttatatgcagcaaaactatttcatgaggctggacttcctgctggtgttttgaatgtagtttccggctttggtccaactgctggtgctgctcttgctagtcacatggaggttgataagcttgcttttaccggttccactgatactgggaaagttgtccttgaactggcggctaaaagcaatcttaagcctgttactttggagcttggtgggaaatctccctttatagtgtgtgaagacgctgatgtagatcaggctgttgagctcgcacactttgccttattctttaatcagggacaatgttgctgtgctgggtctcgaacatttgtacatgaaaatgtatacgaggagtttgttcagaaagcaaaggctcgtgctttgagacgtgttgttggtgatccattcaaggggggaatagagcaaggtcctcagattgattcagaccaatttgagaaaatactgaggtacatcagatccggtgttgaaagcggggcaacccttgaaacaggaggagacaagcttggcaacaagggcttctacattcaacctacagtcttctcaaatgttaaggatggcatgctgattgcaaaggatgagatctttggtccagtccaatccatattaaaattcaaggaccttggtgaggtagttcaaagagcgaacaacacacgttacgggcttgcggcaggagtgttcacaaagaacatggacactgcaaacactttgacgcgggcactgagagttggaacagtttggataaactgctttgacacatttgatgctgcaattccctttggagggtacaaaatgagtggtcaaggcagagaaaaaggagagtatagtctcaaaaactacttgcaagtgaaggctgtcgttaatcccttgaagaacccagcatggctttga

SEQ ID NO: 588 - protein, 536 aa, Glycine max
MASSLRISRLISRSFSSTSFFSRGGNGFLGSRHCKYSTSSAIEEEPVKPSVQVEHTQLLIDGKFVDAASGKTFPTLDPRTGEVIAHVAEGHSEDVDRAVAAARKAFDHGPWPKMTAYERQRILLRVADLLEKHNDELAALETWDNGKPYEQAAKIEVPMLVRLIRYYAGWADKIHGLTVPADGPYHVQTLHEPIDVAGQIIPWNFPLLMFAWKVGPALACGNTIVLKTAEQTPLSALYAAKLFHEAGLPAGVLNVVSGFGPTAGAALASHMEVDKLAFTGSTDTGKVVLELAAKSNLKPVTLELGGKSPFIVCEDADVDQAVELAHFALFFNQGQCCCAGSRTFVHENVYEEFVQKAKARALRRVVGDPFKGGIEQGPQIDSDQFEKILRYIRSGVESGATLETGGDKLGNKGFYIQPTVFSNVKDGMLIAKDEIFGPVQSILKFKDLGEVVQRANNTRYGLAAGVFTKNMDTANTLTRALRVGTVWINCFDTFDAAIPFGGYKMSGQGREKGEYSLKNYLQVKAVVNPLKNPAWL

SEQ ID NO: 589 - DNA, 1581 bp, Hordeum vulgare
  CDS (1)..(1581)
atggcgatggcgatgcgacgcgcggcggcgctcggcgcccgccacatcctagccgcctccggctccgcctcctcccgcgtcgccagccgccgccacatgggcagcgtggacgcgggcgcggcgatggagaagatccgggcggcggggctgctcaggacgcgcggcctcatcggcggcaagtgggtcgacgcctacgacgggaagaccatcgaggtgcaaaatccagcaactggcgaggtccttgcaaatgtagcctgcatgggcaacagagaaacagctgatgcaatagcttctgctcacactacattttatacttggagcaaactcactgcaagtgaaaggagcaaggcactaagaaaatggcatgacctacttatgtcacacaaggaagaacttgcgcttcttatgacactggaacaggggaagcctatgaaagaagcccttggggaggtgaactatggtgcaagtttcatagaattttttgctgaggaagcaaagcgtgtgtatggtgatattattcccccaactctagctgatcgcagactattggttctgaagcagcctattggggtagttggagctattacaccatggaattttcctttagcaatgataaccagaaaggttggaccagcattggcttgtggatgcacagttgttgtcaagccatcagagttcacacctctgacagcattagctgcagcagaccttgctcttcaagctggaataccagctggtgtactaaatgttgtgatgggtaatgctcctgagataggtgatgaactaatgcagagcacacaggtcagaaagattacgttcacgggttcaacagctgttggcaaaaaactgatggctggatcagcaaacaccgtgaaaaaggtttctttggagcttggtgggaatgcaccttgcattgttttcgatgatgcagatattgatgttgccgttaaaggcagtcttgctgccaagtttcggaacagtggacagacatgtgtatgtgcaaacaggatattggtgcaagaaggtatctacgaaaaattcgcaagtgcatttgtcaaggctgttcagagcttgcaagtcggtaatgggctagaagagagtacatcacagggtcctctaatcaatgaagctgccgttcaaaaggtagagaagtttgtaggtgatgctacttcaaagggagccaacgtcatgctcggtggtaaaagacacagcctcgggatgaccttttatgagccaactgtggtagggaacgtaagcaatgatatgcttcttttcagggaagaagtttttggtccagttgcaccacttataccattcaaaactgaggaggaagcaatccatctagcaaacgacaccaatgcaggcttagctgcatacatgtttacaaagagcatagcccggtcatggcgtgtttccgaagctcttgagtacgggcttgtcggtgtgaatgagggattgatttccacagaggtggcgccattcggtggggttaagcagtctggccttgggcgggaaggatcaaaatatggcatggatgacttcctggagattaagtatgtatgcatgggcaacctgggttga

SEQ ID NO: 590 - protein, 526 aa, Hordeum vulgare
MAMAMRRAAALGARHILAASGSASSRVASRRHMGSVDAGAAMEKIRAAGLLRTRGLIGGKWVDAYDGKTIEVQNPATGEVLANVACMGNRETADAIASAHTTFYTWSKLTASERSKALRKWHDLLMSHKEELALLMTLEQGKPMKEALGEVNYGASFIEFFAEEAKRVYGDIIPPTLADRRLLVLKQPIGVVGAITPWNFPLAMITRKVGPALACGCTVVVKPSEFTPLTALAAADLALQAGIPAGVLNVVMGNAPEIGDELMQSTQVRKITFTGSTAVGKKLMAGSANTVKKVSLELGGNAPCIVFDDADIDVAVKGSLAAKFRNSGQTCVCANRILVQEGIYEKFASAFVKAVQSLQVGNGLEESTSQGPLINEAAVQKVEKFVGDATSKGANVMLGGKRHSLGMTFYEPTVVGNVSNDMLLFREEVFGPVAPLIPFKTEEEAIHLANDTNAGLAAYMFTKSIARSWRVSEALEYGLVGVNEGLISTEVAPFGGVKQSGLGREGSKYGMDDFLEIKYVCMGNLG

SEQ ID NO: 591 - DNA, 1491 bp, Hordeum vulgare
  CDS (1)..(1491)
atggcggggacgggggtgttcgcggacgtgctggacggggaggtctacaagtactacgccgacggggagtggcgcgcgtccgcctccggcaagacagtcgccatcgtcaaccccaccacccgccagacgcagtacagggtgcaagcatgtacacaggaggaggtgaacaaggtgatggacgccgccaaggtggcgcagaaggcgtgggcgcggactcctctgtggaagcgcgcggaactcctccacaaggcggcggccatcctcaaggagcacaagaccccgatcgccgagtgcctggtcaaggagattgccaagccggccaaggatgccgtttctgaggtggtgcggtctggcgatttggtgtcgtacacagccgaggagggcgtccggatactaggggagggcaagctgctggtatctgatagcttccccggtaatgagcgcaacaagtactgtttgagctccaaggtaccccttggagtagttttggcaatcccaccatttaactatcctgtcaacctggcggtttctaagattggcccagcgctaattgctggaaattctcttgtgctcaagcctccaactcagggcgcggtggcagccctccatatggtacactgctttcacctggccggtttcccaaagggcctgattagttgtgttactgggaagggttctgaaataggtgattttcttacaatgcatcccggagtcaactgcataagtttcacgggaggcgataccggtatagccatttcgaagaaggccgggatggtcccgcttcagatggaactcggaggaaaagatgcctgcattgtgctagaggatgcggacctcgatctagtcgcagcaaacatagtaaaaggaggcttctcatacagtggccagaggtgcactgcagtcaaagtggttctgatcatggaagtcgtggctgacgccgtcgtggagaaggtcaatgccaaactggcaaagctgaaagttggcccaccagaggatgactgtgatatcaccccagttgtaacagaatcctcggcaaatttcattgaaggcttggtaatggatgccaaggagaaaggggcaactttttgccaagagtacaggagagaaggcaacctcatctggccattgctattggatcatgtccggcctgacatgaggattgcttgggaggagccttttggccctgttttgccagtgatcaggatcaactctgttgaggaaggcatccaccattgcaacgccagcaactttggactccagggatgtgtgttcactagagacatcaacaaggcaatcatgatcagtgatgcaatggagactggaacggtgcagatcaactctgccccggctcgaggaccggaccatttccccttccagggtctcaaggacagtggaataggatcccaggggataaccaacagcataaacatgatgaccaaggtgaagagcactgtcataaacctgccatctccatcctacaccatgggctga

SEQ ID NO: 592 - protein, 496 aa, Hordeum vulgare
MAGTGVFADVLDGEVYKYYADGEWRASASGKTVAIVNPTTRQTQYRVQACTQEEVNKVMDAAKVAQKAWARTPLWKRAELLHKAAAILKEHKTPIAECLVKEIAKPAKDAVSEVVRSGDLVSYTAEEGVRILGEGKLLVSDSFPGNERNKYCLSSKVPLGVVLAIPPFNYPVNLAVSKIGPALIAGNSLVLKPPTQGAVAALHMVHCFHLAGFPKGLISCVTGKGSEIGDFLTMHPGVNCISFTGGDTGIAISKKAGMVPLQMELGGKDACIVLEDADLDLVAANIVKGGFSYSGQRCTAVKVVLIMEVVADAVVEKVNAKLAKLKVGPPEDDCDITPVVTESSANFIEGLVMDAKEKGATFCQEYRREGNLIWPLLLDHVRPDMRIAWEEPFGPVLPVIRINSVEEGIHHCNASNFGLQGCVFTRDINKAIMISDAMETGTVQINSAPARGPDHFPFQGLKDSGIGSQGITNSINMMTKVKSTVINLPSPSYTMG

SEQ ID NO: 593 - DNA, 1584 bp, Zea mays
  CDS (1)..(1584)
atggcgatggcgatgatggctatgcgacgcgcggtggcgctcggcgctcgccacatccccgccgccgcagcctcttcgttccgagtcgtctccctccgccacatgagcgcggacgcgggcgccgcgatggagaagatccgcgccgccgggctgctcaggacgcaggggcttatcgctgggcagtgggtggacgcctacgacggaaagaccattgaggtgcaaaatccagcaactggtgaggtcctggcaaacgtgtcctgtatgggcagcagagaaacatctgatgctattgcttctgctcacagtacattctattcttggagtaaattcactgcaagtgagaggagcaaggcactaagaaaatggtacgatctaattatttcacacaaggaagagcttgcacttctcatgacactggagcaggggaaacctatgaaagaagcccttggtgaggtcaattatggtgcaagtttcatagaatattttgcagaggaagcaaagcgtatatatggtgacatcattcccccaactttatctgatcgcagattgttggttttgaagcagcctgttggggtagttggagctattacaccatggaattttccattagcaatgataacccggaaggttggaccagctttggcctgtggctgtactgttgttgtcaagccatcggagttcacacctctgacagcattagctgcagcagatcttgctcttcaagcgggaataccagcgggtgcattgaatgttgtgatgggtaatgctgctgagataggtgatgcgttgctgcagagtacacaggtcagaaagattacattcactggatcaacagctgttggcaaaaaactgatggctggatctgcaaatactgtgaaaaaggtctccttggaacttggtgggaatgcaccttgcattgttttcgatgatgcggacattgatgttgctgttaaaggcagtcttgctgccaagttccgtaacagtggacagacatgtgtttgtgcaaacaggatattggtgcaagaaggtatctacgaaaagtttgcaaaagcattcatccaggctgttcagagtttgaaggtcggtaacggtctagaagagagtacatctcagggtcctctgattaacgaagctgctgttcaaaaggtggagaagttcataaatgacgcaacttcaaagggagcaaatgtcatgctaggtggtaaaagacacagcctgggaatgtcattttatgagccaactgtagtagggaatgtcagcaatgatatgcttcttttcagagaagaagtttttggtccagttgcaccccttataccgttcaaaactgaggaagaagcagtccatatggccaacgatacaaacgcaggcttagctgcatacatttttaccaagagcatacctcgttcatggcgtgtatctgaatctcttgagtacggcttagttggggtaaacgaggggattatttcaacggaggtggcgccatttggcggagtaaagcagtctggtctagggagagaaggatcgaagtacggcattgacgagtacttggagctcaagtacatctgcatgggcaacttgggttga

SEQ ID NO: 594 - protein, 527 aa, Zea mays
MAMAMMAMRRAVALGARHIPAAAASSFRVVSLRHMSADAGAAMEKIRAAGLLRTQGLIAGQWVDAYDGKTIEVQNPATGEVLANVSCMGSRETSDAIASAHSTFYSWSKFTASERSKALRKWYDLIISHKEELALLMTLEQGKPMKEALGEVNYGASFIEYFAEEAKRIYGDIIPPTLSDRRLLVLKQPVGVVGAITPWNFPLAMITRKVGPALACGCTVVVKPSEFTPLTALAAADLALQAGIPAGALNVVMGNAAEIGDALLQSTQVRKITFTGSTAVGKKLMAGSANTVKKVSLELGGNAPCIVFDDADIDVAVKGSLAAKFRNSGQTCVCANRILVQEGIYEKFAKAFIQAVQSLKVGNGLEESTSQGPLINEAAVQKVEKFINDATSKGANVMLGGKRHSLGMSFYEPTVVGNVSNDMLLFREEVFGPVAPLIPFKTEEEAVHMANDTNAGLAAYIFTKSIPRSWRVSESLEYGLVGVNEGIISTEVAPFGGVKQSGLGREGSKYGIDEYLELKYICMGNLG

SEQ ID NO: 595 - DNA, 1569 bp, Triticum aestivum
  CDS (1)..(1569)
atgcgacgcgcggcggcgctcggcgcccgccacatcctggccgcctccgcctccgcctcctcccgcgtcgccagccgccgccacatgggcagcgtggacgcgggcgcggcgatggagaagatccgggcggcggggctgctcaggacgcgcggcctcatcggcggcaaatgggtcgacgcctacgacgggaagaccatcgaggtgcaaaatccagcaactggcgaggtcctagcaaatgtagcctgcatgggcaacagagaaacagctgatgcaataacttctgctaacactacattttatacttggagcaaactcactgcaagtgaaaggagcaaggcactaagaaaatggcatgacctacttatgtcacacaaggaagaacttgcacttcttatgacactggaacaggggaagcctatgaaagaagcccttggggaggtgaactatggtgcaagtttcatagaattttttgctgaggaagcaaagcgtgtgtatggtgatattattcccccaactctagctgaccgcagactattggttctgaagcagcctattggcgtagttggagctattacaccatggaattttcctttagcaatgataaccagaaaggttggaccagcattggcttgtggatgcactgttgttgtcaagccatcagagttcacacctctgacagcattagctgcagcagaccttgctcttcaagctggaataccagctggtgcactaaatgttgtgatgggtaatgctcctgagataggtgatgaactaatgcagagcatgcaggtcagaaagattacgttcacgggttcaacagctgttggcaaaaaactgatggctggatcagcaaacactgtgaaaaaggtttctttggagctcggtgggaatgcgccttgcattgttttcgatgatgcagatattgatgttgccgttaaaggcagtcttgctgccaagtttcggaacagcggacagacgtgtgtatgtgcaaacaggatattggtgcaagaaggtatctacgaaaaattcgcaagtgcatttgtcaaggctgttcagagtttgcaagtcggtaatgggctagaagagagtacatcacagggtcctctaatcaatgaagctgctgttgaaaaggtagagaagtttgtaggtgatgctacttcaaagggagccaacatcatgctcggtggtaaaaggcacagccttgggatgagcttttatgagccaactgtggtagggaatgtaagcaatgatatgcttcttttcagggaagaagtttttggtccagttgcaccacttataccattcaaaactgaggaggaagcaatccatttagcaaacgacaccaatgcaggcttagccgcatacatgtttacaaagagcattgcgcggtcatggcgtgtttctgaagctcttgaatacgggcttgtcggtgtgaacgagggattgatttcaacagaggtagcgccattcggtggggttaagcagtctgggcttgggcgagaaggatcaaaatacggcatggacgactacctggagattaagtatgtatgcatgggcaacctgggttga

SEQ ID NO: 596 - protein, 522 aa, Triticum aestivum
MRRAAALGARHILAASASASSRVASRRHMGSVDAGAAMEKIRAAGLLRTRGLIGGKWVDAYDGKTIEVQNPATGEVLANVACMGNRETADAITSANTTFYTWSKLTASERSKALRKWHDLLMSHKEELALLMTLEQGKPMKEALGEVNYGASFIEFFAEEAKRVYGDIIPPTLADRRLLVLKQPIGVVGAITPWNFPLAMITRKVGPALACGCTVVVKPSEFTPLTALAAADLALQAGIPAGALNVVMGNAPEIGDELMQSMQVRKITFTGSTAVGKKLMAGSANTVKKVSLELGGNAPCIVFDDADIDVAVKGSLAAKFRNSGQTCVCANRILVQEGIYEKFASAFVKAVQSLQVGNGLEESTSQGPLINEAAVEKVEKFVGDATSKGANIMLGGKRHSLGMSFYEPTVVGNVSNDMLLFREEVFGPVAPLIPFKTEEEAIHLANDTNAGLAAYMFTKSIARSWRVSEALEYGLVGVNEGLISTEVAPFGGVKQSGLGREGSKYGMDDYLEIKYVCMGNLG

SEQ ID NO: 597 - DNA, 1650 bp, Triticum aestivum
  CDS (1)..(1650)
atggctgctgccgccacgaggagggccgcctcctcgctcgcctcccgctgcctgctcgccaggcccgcagcgtcgcccgccgctgtcccctccgcgctccgcagggcagatggggcacgtggattgttgccaggactccttcagaggttcggcactgcggcagcagcagaggagcccatttcgccttctgtccaagtgggcgagacacagctccttatcaacggcaaattcgtcgatgctgcatctggtaaaactttcccgactgtggaccctcgcaccggggaggtgattgcccgtgtggccgaaggagatgccgaagatgttgaccgtgcggttgtcgctgcccgcaaggcattcgatgaagggccatggcccaggatgactgcctatgagagatcccgtattcttctgcggtttgctgatttgatagagaaacacaatgatgatatcgctgcactggagacgtgggacaacgggaagccctatgagcaagctgcccacatcgaagtgccaatgcttgttcggcttatgcggtactatgcaggctggactgacaagatccatggtctcatcgtaccggctgatggccctcaccatgtacaggtgctgcacgagccgattggtgtcgtgggtcagatcatcccgtggaacttcccacttttgatgtatggctggaaagttggccctgctttggcctgtggtaacactattgttctcaagactgctgaacaaactcctctatctgccctctatgtttctaagctgttgcatgaggctggactacccgaaggtgtcctgaacatcgtatctggtttcggtcctactgctggggctgctcttgctagccacatggatgttgacaagattgcattcactggatcaaccgatactgggaaagttattcttgagttatctgcacggagcaatcttaagccagtgacactggagctaggaggcaagtctccttttatcgtcatggatgatgcagatatcgaccaagccgttgagcttgcgcattttgcgctgttttttaaccagggacaatgctgctgcgctgggtctcgcacgttcgtacatgagcgtgtttatgatgagtttgttgagaagtccaaggctcgcgctttgaagcgtgtagttggtgatccattcaggaaaggtgttgagcagggtcctcagattgatgacgagcaattcaagaagatcttgcggtacattaagtcgggtgtggacagtggagccacccttgtgacgggtggtgacaagttgggtgacaaaggttactacatccagccaacaattttctcagatgtgcaggatggcatgaagattgcccaagaggagatatttgggcctgttcagtcaatcttcaagttcaatgacctcaacgaggtgatcaagagggcgaacgcaagccagtacggattggccgcaggtgttttcaccaacaacctggacacggccaacaccttgacgcgtgccctcagggccggcacggtctgggtgaactgcttcgacatctttgacgccgcgatccccttcggcgggtacaagatgagcggcatcggtagggagaagggcatcgacagcctgaagaactacctgcaagtcaaggcggtcgtcaccgcacttaagaaccccgcatggttgtga

SEQ ID NO: 598 - protein, 549 aa, Triticum aestivum
MAAAATRRAASSLASRCLLARPAASPAAVPSALRRADGARGLLPGLLQRFGTAAAAEEPISPSVQVGETQLLINGKFVDAASGKTFPTVDPRTGEVIARVAEGDAEDVDRAVVAARKAFDEGPWPRMTAYERSRILLRFADLIEKHNDDIAALETWDNGKPYEQAAHIEVPMLVRLMRYYAGWTDKIHGLIVPADGPHHVQVLHEPIGVVGQIIPWNFPLLMYGWKVGPALACGNTIVLKTAEQTPLSALYVSKLLHEAGLPEGVLNIVSGFGPTAGAALASHMDVDKIAFTGSTDTGKVILELSARSNLKPVTLELGGKSPFIVMDDADIDQAVELAHFALFFNQGQCCCAGSRTFVHERVYDEFVEKSKARALKRVVGDPFRKGVEQGPQIDDEQFKKILRYIKSGVDSGATLVTGGDKLGDKGYYIQPTIFSDVQDGMKIAQEEIFGPVQSIFKFNDLNEVIKRANASQYGLAAGVFTNNLDTANTLTRALRAGTVWVNCFDIFDAAIPFGGYKMSGIGREKGIDSLKNYLQVKAVVTALKNPAWL

SEQ ID NO: 599 - DNA, 1491 bp, Triticum aestivum
  CDS (1)..(1491)
atggcggggacgggggtgttcgcggacgtgctggacggggaggtctacaagtactacgccgacggggagtggcgcgcgtccgcctccggcaagacggtcgccatcgtcaaccccaccacccgccagacgcagtacagggtgcaagcatgtacacaggaggaggtgaacaaggtgatggacgccgccaaggtggcgcagaaggcgtgggcgcggactccgctgtggaagcgcgcggagctcctccacaaggcggcggccatcctcaaggagcacaagaccccgatcgccgagtgtctggtcaaggagatcgccaagccggccaaggatgccgtttctgaggtggtgcgatccggcgatttggtgtcatacacggccgaggagggtgtccggatactgggggagggcaagctgctggtatccgatagcttccccggtaatgagcgcaacaagtactgtttgagctccaaggtacctcttggagtagttttggcaatcccaccatttaactatcctgtcaacctggcggtttctaagattggcccagcgctaattgctggcaattctcttgtgctcaagcctccgactcagggcgcggtggcagccctccatatggtacactgctttcacctggccggtttcccaaagggcctgataagctgtgttactgggaaaggttctgaaataggtgattttctcacaatgcaccctggagtcaactgcataagtttcacgggaggtgataccggcatagccatttcaaagaaggccgggatggtcccgcttcagatggagctaggaggaaaagatgcctgcattgtgctggaggatgcagacctcgatctagtcgcggcaaacatagtaaaaggaggcttctcatacagtggccagaggtgcactgcagtaaaagtggttctgatcatggaagcggttgccgacaccgtggtggagaaggtcaacgccaagctggcaaagctgaaagtgggcccaccagaggatgacagtgatatcaccccagttgtaacagaatcctcggcaaatttcattgaaggcttggtaatggatgccaaggagaaaggggcaaccttttgccaagagtacaggagagaaggcaaccttatctggccgttgctgctggatcatgtccggcctgacatgaggatcgcctgggaggagccttttggccctgtcttgcccgtgatcaggatcaactcggttgaggaaggcatccaccattgcaacgccagcaactttgggctccagggatgtgtgttcacaagagacatcaacaaggcaatcatgatcagtgatgcaatggagagtggaactgtgcagatcaactccgccccggctcgaggtccggaccatttccccttccagggcctgaaggacagtggaataggatcccaggggataacgaacagcataaacatgatgaccaaggtgaagagcactgtcataaacctcccatctccgtcctacaccatgggctga

SEQ ID NO: 600 - protein, 496 aa, Triticum aestivum
MAGTGVFADVLDGEVYKYYADGEWRASASGKTVAIVNPTTRQTQYRVQACTQEEVNKVMDAAKVAQKAWARTPLWKRAELLHKAAAILKEHKTPIAECLVKEIAKPAKDAVSEVVRSGDLVSYTAEEGVRILGEGKLLVSDSFPGNERNKYCLSSKVPLGVVLAIPPFNYPVNLAVSKIGPALIAGNSLVLKPPTQGAVAALHMVHCFHLAGFPKGLISCVTGKGSEIGDFLTMHPGVNCISFTGGDTGIAISKKAGMVPLQMELGGKDACIVLEDADLDLVAANIVKGGFSYSGQRCTAVKVVLIMEAVADTVVEKVNAKLAKLKVGPPEDDSDITPVVTESSANFIEGLVMDAKEKGATFCQEYRREGNLIWPLLLDHVRPDMRIAWEEPFGPVLPVIRINSVEEGIHHCNASNFGLQGCVFTRDINKAIMISDAMESGTVQINSAPARGPDHFPFQGLKDSGIGSQGITNSINMMTKVKSTVINLPSPSYTMG

SEQ ID NO: 601 - DNA, 1503 bp, Triticum aestivum
  CDS (1)..(1503)
atggcggcagcgaacggcgccaaggggttcgaggtgccggaactggacatcaagttcaccaagctcttcatcaatggccagttcgtcgacgcggcttccggcaagacgttcgagacacgggacccacgcaccggcgaggtgatcgccaggatcgccgagggagacaaggccgacatcgacctcgccgtgaaggccgcccgcgaggccttcgacaacggcccatggcccagaatgcccggctgtgcaagggcccggatcatgcacaagttcgcggacctggtggaccagcacgtcgaggagctggcggcgctggacacggtggacgccggcaagctattcatgatgggtaagatgatggacatccccggaggcgccaacctgctccgctactacgccggcgccgccgacaagatccacggcgagacgctcaagatggcgcgcccgctccacggctacacgctcaaggagcccgtcggcgtcgtgggccacatcgtgccctggaactaccccaccaccatgttcttcttcaaggtcagccccgcgctcgccgccggctgcaccatggtcgtcaagcccgccgagcagacgcccctctccgcgctcttctacgcccacctcgccaaggaggccggcatccccgacggcgttctcaacgtcgtgcccggatttggacccacggccggtgccgccatcgcctctcacatggacgtcgacaagatcagcttcacgggatccacggaggtcgggcggctggtcatgcaggctgcggccacgagcaacctaaagcccgtctcactggagctggggggcaagtcccccgtcatcgtgtttgacgacgccgacgttgacatggccgtcaacctcgttaacatggccacctacatgaacaagggcgagatctgcgtcgccggcacacgcatatacgtgcaggaagggatctacgacgcctttgtgaagaaatcggtcgagcttgccaagaaatcggtggtcggagatcctttcaacccaaacgtacatcaaggccctcaggttgacaaggatcaatacgaaaaggtgctcaagtacatcgacgtcggtaagagcgaaggcgccaccctcctcaccggagggaagccctgcagcgacaagggttactacatcgagcccaccatcttcaccgacgtcaccgatgacatgtcgattgcgcaagaggaaatcttcggcccagtcatggctctcatgaaattcaagacggtggacgaggtgattcagaaggccaacagcacccggtatggcctggccgccggcgtggtgaccaagaacatcgacaccatgaacaccgtgtcgcggtccgtcaggtccggggtcgtctgggttaactgctacttcgccttcgaccccgacgccccgttcggcggctgcaagatgagcggcttcggcaaggacatgggcacggatgccctcgaaaagtacctgcacaccaagactgtggtcactccgctctacaacacaccctggctgtga

SEQ ID NO: 602 - protein, 500 aa, Triticum aestivum
MAAANGAKGFEVPELDIKFTKLFINGQFVDAASGKTFETRDPRTGEVIARIAEGDKADIDLAVKAAREAFDNGPWPRMPGCARARIMHKFADLVDQHVEELAALDTVDAGKLFMMGKMMDIPGGANLLRYYAGAADKIHGETLKMARPLHGYTLKEPVGVVGHIVPWNYPTTMFFFKVSPALAAGCTMVVKPAEQTPLSALFYAHLAKEAGIPDGVLNVVPGFGPTAGAAIASHMDVDKISFTGSTEVGRLVMQAAATSNLKPVSLELGGKSPVIVFDDADVDMAVNLVNMATYMNKGEICVAGTRIYVQEGIYDAFVKKSVELAKKSVVGDPFNPNVHQGPQVDKDQYEKVLKYIDVGKSEGATLLTGGKPCSDKGYYIEPTIFTDVTDDMSIAQEEIFGPVMALMKFKTVDEVIQKANSTRYGLAAGVVTKNIDTMNTVSRSVRSGVVWVNCYFAFDPDAPFGGCKMSGFGKDMGTDALEKYLHTKTVVTPLYNTPWL

SEQ ID NO: 603 - DNA, 1518 bp, Zea mays
  CDS (1)..(1518)
atggcctcgcaagcgatggtaccgctgcggcagctctttgtcgacggcgagtggcgcccgcccgcgcagggccgccgcctccccgtcgtcaaccctaccactgaggctcacatcggcgagatcccggcgggcacggcggaggacgtggacgccgcggtggcggcggcgcgcgcggcgctcaagaggaaccgcggccgcgactgggcgcgcgccccgggggccgtccgggccaagtacctccgcgccatcgccgccaaggtaattgagaggaaacaagagctagctaagctagaggcacttgattgtgggaagccttatgatgaagcagcatgggacatggatgatgttgctgggtgctttgagtacttcgcagatcaggcagaagctttggacaaaagacaaaattccccagtttctcttccgatggaaacttttaaatgccatctccgaagagagcctattggggtagttgggctgataactccttggaactatcctctcctgatggctacatggaaggtagctcctgctctggctgctggttgtgcagctgtgctaaagccatctgaattggcttctgtgacttgcttagagcttgctgatatctgtaaagaagtcggtcttcctcccggtgtcttaaacattgtgacaggattaggtcctgatgctggtgctcctttgtcagcacacccagatgttgacaaggtcgcttttactgggagttttgaaactggtaagaagattatggcggctgcagctcctatggttaagcctgttacactggaacttggtggaaaaagtcctatagtagtatttgatgatgttgacattgacaaagctgttgagtggactctgtttgggtgcttttggaccaatggtcagatttgcagcgcaacatctcgtcttcttatccatacaaaaattgctaaaaaatttaatgagaggatggttgcatgggccaaaaatattaaggtttcggatccacttgaagagggttgcaggcttgggccagttgttagtgaaggacagtatgagaagattaaaaagttcatatcgaatgccaaaagccaaggtgctactattctgactggaggtgttagacctgcgcatcttgagaaggggttctttattgaaccaacaatcattactgatatcaccacatcaatggaaatctggagggaggaagtctttggtccagtcctgtgcgttaaagaatttagcactgaagatgaagccatcgaactggccaatgatacacagtatggtttagctggtgctgtaatttctggtgatcgggagcgctgccagagattatctgaggagattgacgctggaattatctgggtaaactgctcacagccctgcttctgccaagctccctggggcggtaacaagcgtagtggatttggacgtgagcttggagaagggggcattgataactacctgagcgtcaagcaagtcacggagtacatctctgatgagccgtggggatggtaccaatccccctccaagctgtaa

SEQ ID NO: 604 - protein, 505 aa, Zea mays
MASQAMVPLRQLFVDGEWRPPAQGRRLPVVNPTTEAHIGEIPAGTAEDVDAAVAAARAALKRNRGRDWARAPGAVRAKYLRAIAAKVIERKQELAKLEALDCGKPYDEAAWDMDDVAGCFEYFADQAEALDKRQNSPVSLPMETFKCHLRREPIGVVGLITPWNYPLLMATWKVAPALAAGCAAVLKPSELASVTCLELADICKEVGLPPGVLNIVTGLGPDAGAPLSAHPDVDKVAFTGSFETGKKIMAAAAPMVKPVTLELGGKSPIVVFDDVDIDKAVEWTLFGCFWTNGQICSATSRLLIHTKIAKKFNERMVAWAKNIKVSDPLEEGCRLGPVVSEGQYEKIKKFISNAKSQGATILTGGVRPAHLEKGFFIEPTIITDITTSMEIWREEVFGPVLCVKEFSTEDEAIELANDTQYGLAGAVISGDRERCQRLSEEIDAGIIWVNCSQPCFCQAPWGGNKRSGFGRELGEGGIDNYLSVKQVTEYISDEPWGWYQSPSKL

SEQ ID NO: 605 - DNA, 1497 bp, Zea mays
  CDS (1)..(1497)
atggcgctggcggggacgggggtgttcgcggagatcctggacagcgaggtgtacaggtactacgccgacggggagtggcgcacctccgcctccggcaagtccgtcgccatcgtcaaccccaccacccgcaagacgcagtacagggtgcaagcatgcacgcaggaggaggtgaacaaggcgatggacgcggccaaggtcgcgcagaaggcatgggcccggacgccgctgtggaagcgtgcggacctcctccacaaggcggccgcgatcctgaaggagcacaaggcccccatcgccgagtgccttgtcaaggagatagccaagccggccaaggatgccgtttctgaggttgtccggtctggggatttggtgtcgtacacagctgaggagggtgtgcggatactcggggagggcaagctgcttgtttcggatagcttccctggtaatgaacgaaacaagtactgtctgagctccaagataccccttggagtagttttggcaatcccgccgttcaactatcctgtcaacttagcagtttctaagattggcccagcactaattgcaggcaatgctcttgtgctaaagcctccaactcagggcgctgtggctgcacttcatatggtacactgcttccacctggctggtttcccgaaaggtttgatcagttgtgtgactgggaagggttctgaaataggagattttcttacaatgcatcctggagtcaactgcataagttttactggtggcgatactggtatagccatttcaaagaaggctggaatggtccctcttcagatggagcttgggggaaaagatgcttgcattgtgctagaggatgcagatctggatttggtttccgcaaatatagtaaagggtggcttctcatacagtggccagaggtgcactgctgtcaaagtagtgctgatcatggaatcgattgctgatgctgtggtacagaaggttaatgccaagttggcgaaactgaaagttggcccacctgaggacgactctgatatcaccccggttgtaacagaatcctcagccaacttcatcgagggtctggtgatggatgcaaaggagaaaggagcaactttctgccaggagtacaggagagaaggcaaccttatctggccgttgctgctggatcatgtccgccctgacatgaggatcgcatgggaggagccttttgggcctgtcttgcctgtgattaggattaactcagttgaggaaggcatccaccattgcaatgccagtaatttcggcctacagggatgcatttttacaagagacatcaacaaggcaatcctgatcagtgatgcaatggagactggaactgtgcagatcaactctgcaccggctcgtgggcctgatcatttccccttccagggactgaaagacagtggcattgggtcccaggggataacaaacagcattaacatgatgaccaaggtgaagagcactgtcataaacctgccgtcaccatcctacaccatgggctga

SEQ ID NO: 606 - protein, 498 aa, Zea mays
MALAGTGVFAEILDSEVYRYYADGEWRTSASGKSVAIVNPTTRKTQYRVQACTQEEVNKAMDAAKVAQKAWARTPLWKRADLLHKAAAILKEHKAPIAECLVKEIAKPAKDAVSEVVRSGDLVSYTAEEGVRILGEGKLLVSDSFPGNERNKYCLSSKIPLGVVLAIPPFNYPVNLAVSKIGPALIAGNALVLKPPTQGAVAALHMVHCFHLAGFPKGLISCVTGKGSEIGDFLTMHPGVNCISFTGGDTGIAISKKAGMVPLQMELGGKDACIVLEDADLDLVSANIVKGGFSYSGQRCTAVKVVLIMESIADAVVQKVNAKLAKLKVGPPEDDSDITPVVTESSANFIEGLVMDAKEKGATFCQEYRREGNLIWPLLLDHVRPDMRIAWEEPFGPVLPVIRINSVEEGIHHCNASNFGLQGCIFTRDINKAILISDAMETGTVQINSAPARGPDHFPFQGLKDSGIGSQGITNSINMMTKVKSTVINLPSPSYTMG

SEQ ID NO: 607 - DNA, 1584 bp, Zea mays
  CDS (1)..(1584)
atggcgatggcgatgatggctatgcgacgcgcggtggcgctcggcgctcgccacatccccgccgccgcagcctcttcgttccgagtcgtctccctccgccacatgagcgcggacgcgggcgccgcgatggagaagatccgcgccgccgggctgctcaggacgcaggggcttatcgctgggcagtgggtggacgcctacgacggaaagaccattgaggtgcaaaatccagcaactggtgaggtcctggcaaacgtgtcctgtatgggcagcagagaaacatctgaggctattgcttctgctcacagtacattctattcttggagtaaattcactgcaagtgagaggagcaaggcactaagaaaatggtacgatctaattatttcacacaaggaagagcttgcacttctcatgacactggagcaggggaaacctatgaaagaagcccttggtgaggtcaattatggtgcaagtttcatagaatattttgcagaggaagcaaagcgtatatatggtgacatcattcccccaactttatctgatcgcagattgttggttttgaagcagcctgttggggtagttggagctattacaccatggaattttccattagcaatgataacccggaaggttggaccagctttggcctgtggctgtactgttgttgtcaagccatcggagttcacacctctgacagcattagctgcagcagatcttgctcttcaagcgggaataccagcgggtgcattgaatgttgtgatgggtaatgctgctgagataggtgatgcgttgctgcagagtacacaggtcagaaagattacattcactggatcaacagctgttggcaaaaaactgatggctggatctgcaaatactgtgaaaaaggtctccttggaacttggtgggaatgcaccttgcattgttttcgatgatgcggacattgatgttgctgttaaaggcagtcttgctgccaagttccgtaacagtggacagacatgtgtttgtgcaaacaggatattggtgcaagaaggtatctacgaaaagtttgcaaaagcattcatccaggctgttcagagtttgaaggtcggtaacggtctagaagagagtacatctcagggtcctctgattaacgaagctgctgttcaaaaggtggagaagttcataaatgacgcaacttcaaagggagcaaatgtcatgctaggtggtaaaagacacagcctgggaatgtcattttatgagccaactgtagtagggaatgtcagcaacgatatgcttcttttcagagaagaagtttttggtccagttgcaccccttataccgttcaaaactgaggaagaagcagtccatatggccaacgatacaaacacaggcttagctgcatacatttttaccaagagcatacctcgttcatggcgtgtatctgaatctcttgagtacggcttagttggggtaaacgaggggattatttcaacggaggtggcgccatttggcggagtaaagcagtctggtctagggagagaaggatcgaagtacggcattgacgagtacttggagctcaagtacatctgcatgggcaacttgggttga

SEQ ID NO: 608 - protein, 527 aa, Zea mays
MAMAMMAMRRAVALGARHIPAAAASSFRVVSLRHMSADAGAAMEKIRAAGLLRTQGLIAGQWVDAYDGKTIEVQNPATGEVLANVSCMGSRETSEAIASAHSTFYSWSKFTASERSKALRKWYDLIISHKEELALLMTLEQGKPMKEALGEVNYGASFIEYFAEEAKRIYGDIIPPTLSDRRLLVLKQPVGVVGAITPWNFPLAMITRKVGPALACGCTVVVKPSEFTPLTALAAADLALQAGIPAGALNVVMGNAAEIGDALLQSTQVRKITFTGSTAVGKKLMAGSANTVKKVSLELGGNAPCIVFDDADIDVAVKGSLAAKFRNSGQTCVCANRILVQEGIYEKFAKAFIQAVQSLKVGNGLEESTSQGPLINEAAVQKVEKFINDATSKGANVMLGGKRHSLGMSFYEPTVVGNVSNDMLLFREEVFGPVAPLIPFKTEEEAVHMANDTNTGLAAYIFTKSIPRSWRVSESLEYGLVGVNEGIISTEVAPFGGVKQSGLGREGSKYGIDEYLELKYICMGNLG

SEQ ID NO: 609 - DNA, 1530 bp, Zea mays
  CDS (1)..(1530)
atgggggccttcgcgaaggaggagcaccagttcctagccgagctcggcctcgcgcagcgcaacccaggcgcgttcgcatgcggtgcgtggggcggctcaggtcccaccgtcacctccacgagcccgaccaacaatcaggtcatcgcagaggtcgtggaggcgtccgtgcacgactacgaggagggcatgcgcgcctgcttcgatgccgccaagacatggatggcgattcctgctccaaagcgaggagagatcgttaggcaaatcggtgatgcactgagagcaaagctccatcaccttggcaggcttgtgtcacttgagatggggaaaattcttcctgaagggatcggtgaggttcaggaaatcatcgacatgtgtgattatgctgtggggctaagtcgccaactaaatggatccattataccatctgaacgaccaaaccatatgatgatggaggtgtggaatccccttggagttgtgggtgttataacggcatttaatttcccttgtgctgtgcttggttggaatgcttgcattgctttggtctgtggaaattgtgtcgtctggaaaggtgctccaacaactccactgatcactattgcaatgacaaaaatagtggctagtgtattggagaagaacaacttgccaggcgcaatttttacatctttttgtgggggcactgaaattggtcaagcaattgcccttgacattaggatacctttggtttcattcactggaagtacaagggctggtctaatggttcagcaacaagttagtgcaagatttggtaaatgccttcttgaacttagcggaaacaatgccatcattgttatggatgatgcagatatccagctagctgtgcgatctgtcttgttcgctgctgttggtacagcaggacaacgctgcactacatgtcgtaggctgattcttcatgagaacatatatcaaaccttccttgatcagcttgttgaggtatacaaacaagtccgaattggggatccgttggagaaaggcaccttactgggaccactgcacactcctgcttcaaaagagaactttttgaaaggcattcagactatcaaatctcagggagggaaaatcctttttggaggatctgccattgaatcagaaggaaactttgtgcaaccaacaattgtggaaattacaccttctgcaccagttgtgaaagaagaactctttggtcctgtcctttatgttatgaaatttcagtccttgaaggaagcaattgaaatcaataactctgttcctcaaggattgagcagttctatatttacaaagaggccagatattatttttaagcggctcgggccccatggtagtgattgtggtatagtgaatgtgaacatacctactaatggtgctgaaattggtggagcatttggtggagaaaaagcaactggtggtggacgagaagcagggagtgattcctggaagcagtacatgaggagggcgacttgtacaatcaactatgggagcgagctacctctagcccagggaatcaattttggttaa

SEQ ID NO: 610 - protein, 509 aa, Zea mays
MGAFAKEEHQFLAELGLAQRNPGAFACGAWGGSGPTVTSTSPTNNQVIAEVVEASVHDYEEGMRACFDAAKTWMAIPAPKRGEIVRQIGDALRAKLHHLGRLVSLEMGKILPEGIGEVQEIIDMCDYAVGLSRQLNGSIIPSERPNHMMMEVWNPLGVVGVITAFNFPCAVLGWNACIALVCGNCVVWKGAPTTPLITIAMTKIVASVLEKNNLPGAIFTSFCGGTEIGQAIALDIRIPLVSFTGSTRAGLMVQQQVSARFGKCLLELSGNNAIIVMDDADIQLAVRSVLFAAVGTAGQRCTTCRRLILHENIYQTFLDQLVEVYKQVRIGDPLEKGTLLGPLHTPASKENFLKGIQTIKSQGGKILFGGSAIESEGNFVQPTIVEITPSAPVVKEELFGPVLYVMKFQSLKEAIEINNSVPQGLSSSIFTKRPDIIFKRLGPHGSDCGIVNVNIPTNGAEIGGAFGGEKATGGGREAGSDSWKQYMRRATCTINYGSELPLAQGINFG

SEQ ID NO: 611 - DNA, 1518 bp, Zea mays
  CDS (1)..(1518)
atggcctcgccagcgatggtcccgctgcggcagctcttcgtcgacggcgagtggcgcccgcccgcgcagggccgccgcctccccgtcgtcaaccccaccaccgaggctcacatcggcgagatccctgcgggcacagcggaggacgtggacgccgcggtggcggcggcgcgggcggcgctcaagaggaaccgtggccgcgactgggcgcgcgccccgggggccgtccgggccaagtacctccgcgctatcgccgccaaggtgattgagaggaaacctgagctggctaagctagaggcacttgattgtgggaagccttatgatgaagcagcatgggacatggatgatgttgctgggtgctttgagtactttgcggatcaggcagaagccttggataaaaggcaaaattccccagtttctcttccaatggaaacttttaaatgtcatctccgaagagagcctattggggtagttgggctgataactccttggaactatcctctactgatggctacatggaagatagcccctgcattggctgctggttgtacagctgtgctgaagccatctgaactggcttctgtgacttgcttagagcttgctgatatctgtaaagaagtcggtctcccttctggtgtcttgaacattgtgacaggattaggtcctgatgctggcgctcctttgtcagcacacccagatgttgacaaggtcgcttttactgggagttttgaaactggcaagaaaattatggcatcggcagctcctatggtcaagcctgttacactggaacttggtggaaaaagtcctatagtagtatttgatgatgttgacattgacaaagctgtcgagtggactctgtttgggtgcttttggaccaatggtcagatttgcagcgcaacatctcgtcttcttatccatacaaaaattgctaaaaaatttaatgagaggatggttgcatgggccaaaaatattaaggtttcggatccacttgaagagggttgcaggcttgggccagttgttagtgaaggacagtatgagaagattaagaagttcatatcgaatgccaaaagccaaggtgctactattctgactggaggtgttagacctgcgcatcttgagaaggggttctttattgaaccaactattattactgatatcaccacatcaatggaaatctggagggaggaagtctttggtccagtcctgtgcgttaaagaatttagcactgaagatgaagccatcgaacttgccaacgatacacagtatggtttggctggtgctgtaatttctggtgatcgggagcgctgccagaggttatctgaggagattgacgctggatgcatctgggtaaactgctcgcaaccctgcttctgccaagctccctggggcgggaacaagcgcagtggatttggacgtgagcttggagaagggggcattgataactacctgagcgtcaagcaagtcacggagtacatctctgatgagccgtggggatggtaccaatccccctccaagctgtaa

SEQ ID NO: 612 - protein, 505 aa, Zea mays
MASPAMVPLRQLFVDGEWRPPAQGRRLPVVNPTTEAHIGEIPAGTAEDVDAAVAAARAALKRNRGRDWARAPGAVRAKYLRAIAAKVIERKPELAKLEALDCGKPYDEAAWDMDDVAGCFEYFADQAEALDKRQNSPVSLPMETFKCHLRREPIGVVGLITPWNYPLLMATWKIAPALAAGCTAVLKPSELASVTCLELADICKEVGLPSGVLNIVTGLGPDAGAPLSAHPDVDKVAFTGSFETGKKIMASAAPMVKPVTLELGGKSPIVVFDDVDIDKAVEWTLFGCFWTNGQICSATSRLLIHTKIAKKFNERMVAWAKNIKVSDPLEEGCRLGPVVSEGQYEKIKKFISNAKSQGATILTGGVRPAHLEKGFFIEPTIITDITTSMEIWREEVFGPVLCVKEFSTEDEAIELANDTQYGLAGAVISGDRERCQRLSEEIDAGCIWVNCSQPCFCQAPWGGNKRSGFGRELGEGGIDNYLSVKQVTEYISDEPWGWYQSPSKL

SEQ ID NO: 613 - DNA, 1521 bp, Zea mays
  CDS (1)..(1521)
atggcgccgccgcagacgatcccccggcgcggcctcttcattggcggggcctggagggagccgtgcctcgggcgccgcctgcccgtcgtcaacccggccaccgaggccaccatcggcgacatcccggcgggcacggcggaggacgtggagatcgcggtcgccgcggcgcgggacgcgttctcccgcgacggcgggaggcactggtcgcgcgcccctggggccgtgcgcgccaacttcctccgggcgatcgccgccaagattaaagacaggaaatctgagctggctttgctggagacacttgattctggaaagcctctggatgaagcaagtggagacatggacgatgtcgctgcatgctttgagtactatgctgatctggcagaagctttagatgggaagcaacagtcaccgatctctctgcctatggaaaactttaagtcgtatgtacttaaagaacccattggggttgttggactgatcactccttggaattatcctctgttgatggcaacttggaaggtcgcacctgccttggctgctgggtgtacaactatattaaaaccttcagagttggcttctgtgagctgcttagagcttggtgcaatatgtatggaaataggcctaccaccaggtgtcttgaacataattactggtctgggccctgaagctggtgctccattatcctcacattcccatgtggataaggttgcttttactggaagtacagagactggtaagaggataatgatttcagctgcccaaatggttaagcctgtttcattagagcttggtgggaaaagtcctcttattgtctttgatgacattggtgacattgacaaagctgttgaatggaccatgtttgggatcttcgcgaatgctggtcaagtctgcagtgctacttctcgtttactgctgcatgagaaaattgcaaagaaattcttggatagattggttgcatgggcaaagaatataaaagtctcagatccactggaggaaggctgcagactgggttcagttatcagtgaaggacagtacgagaagataaagaaattcatctcgactgcaagaagtgaaggtgccacaattctgtatggaggtggccgaccacagcatctcagaagagggttctttcttgaacctacaattataacagatgttagtacgtcaatgcaaatttggcaagaggaagtctttggaccagttatctgtgttaaggagtttaggacagagagtgaagctgtggaacttgcaaatgatactcactatggtttagctggtgccgtgatctccaatgatcaggagaggtgcgagcgcatttcaaaggctcttcactctggtattatttggataaattgctcgcaaccatgcttcgtccaagctccttggggagggaacaagcggagcggttttggtcgggagctcggagaatggggtcttgataactacctgacagttaagcaagtcaccaagtattgctcggatgaaccgtggggatggtaccagcctccatctaagctgtga

SEQ ID NO: 614 - protein, 506 aa, Zea mays
MAPPQTIPRRGLFIGGAWREPCLGRRLPVVNPATEATIGDIPAGTAEDVEIAVAAARDAFSRDGGRHWSRAPGAVRANFLRAIAAKIKDRKSELALLETLDSGKPLDEASGDMDDVAACFEYYADLAEALDGKQQSPISLPMENFKSYVLKEPIGVVGLITPWNYPLLMATWKVAPALAAGCTTILKPSELASVSCLELGAICMEIGLPPGVLNIITGLGPEAGAPLSSHSHVDKVAFTGSTETGKRIMISAAQMVKPVSLELGGKSPLIVFDDIGDIDKAVEWTMFGIFANAGQVCSATSRLLLHEKIAKKFLDRLVAWAKNIKVSDPLEEGCRLGSVISEGQYEKIKKFISTARSEGATILYGGGRPQHLRRGFFLEPTIITDVSTSMQIWQEEVFGPVICVKEFRTESEAVELANDTHYGLAGAVISNDQERCERISKALHSGIIWINCSQPCFVQAPWGGNKRSGFGRELGEWGLDNYLTVKQVTKYCSDEPWGWYQPPSKL

SEQ ID NO: 615 - DNA, 22 bp, Artificial sequence
  primer
atgtcccgaatggcagaacagc

SEQ ID NO: 616 - DNA, 26 bp, Artificial sequence
  primer
ttagaatatggactggaatttagcca

SEQ ID NO: 617 - protein, 595 aa, Artificial sequence
  consensus sequence
  Variant (2)..(13): Xaa in position 2 to 13 is any amino acid
  Variant (14)..(32): Xaa in position 14 to 32 is any or no amino acid
  Variant (34)..(48): Xaa in position 34 to 48 is any amino acid
  Variant (49)..(56): Xaa in position 49 to 56 is any or no amino acid
  Variant (58)..(60): Xaa in position 58 to 60 is any amino acid
  Variant (62)..(62): Xaa in position 62 is any amino acid
  Variant (63)..(63): Xaa in position 63 is any or no amino acid
  Variant (65)..(67): Xaa in position 65 to 67 is any amino acid
  Variant (68)..(72): Xaa in position 68 to 72 is any or no amino acid
  Variant (74)..(79): Xaa in position 74 to 79 is any amino acid
  Variant (80)..(98): Xaa in position 80 to 98 is any or no amino acid
  Variant (100)..(102): Xaa in position 100 to 102 is any amino acid
  Variant (104)..(117): Xaa in position 104 to 117 is any amino acid
  Variant (118)..(118): Xaa in position 118 is any or no amino acid
  Variant (120)..(126): Xaa in position 120 to 126 is any amino acid
  Variant (127)..(134): Xaa in position 127 to 134 is any or no amino acid
  Variant (137)..(178): Xaa in position 137 to 178 is any amino acid
  Variant (179)..(188): Xaa in position 179 to 188 is any or no amino acid
  Variant (190)..(190): Xaa in position 190 is any amino acid
  Variant (193)..(195): Xaa in position 193 to 195 is any amino acid
  Variant (197)..(197): Xaa in position 197 is any amino acid
  Variant (201)..(201): Xaa in position 201 is any amino acid
  Variant (203)..(208): Xaa in position 203 to 208 is any amino acid
  Variant (210)..(211): Xaa in position 210 to 211 is any amino acid
  Variant (216)..(216): Xaa in position 216 is any amino acid
  Variant (218)..(222): Xaa in position 218 to 222 is any amino acid
  Variant (224)..(225): Xaa in position 224 to 225 is any amino acid
  Variant (227)..(232): Xaa in position 227 to 232 is any amino acid
  Variant (234)..(242): Xaa in position 234 to 242 is any amino acid
  Variant (244)..(244): Xaa in position 244 is any amino acid
  Variant (245)..(245): Xaa in position 245 is any or no amino acid
  Variant (247)..(247): Xaa in position 247 is any amino acid
  Variant (250)..(250): Xaa in position 250 is any amino acid
  Variant (252)..(254): Xaa in position 252 to 254 is any amino acid
  Variant (256)..(259): Xaa in position 256 to 259 is any amino acid
  Variant (260)..(264): Xaa in position 260 to 264 is any or no amino acid
  Variant (266)..(270): Xaa in position 266 to 270 is any amino acid
  Variant (272)..(275): Xaa in position 272 to 275 is any amino acid
  Variant (277)..(278): Xaa in position 277 to 278 is any amino acid
  Variant (283)..(285): Xaa in position 283 to 285 is any amino acid
  Variant (287)..(295): Xaa in position 287 to 295 is any amino acid
  Variant (296)..(299): Xaa in position 296 to 299 is any or no amino acid
  Variant (301)..(304): Xaa in position 301 to 304 is any amino acid
  Variant (310)..(310): Xaa in position 310 is any amino acid
  Variant (312)..(318): Xaa in position 312 to 318 is any amino acid
  Variant (319)..(323): Xaa in position 319 to 323 is any or no amino acid
  Variant (325)..(327): Xaa in position 325 to 327 is any amino acid
  Variant (329)..(340): Xaa in position 329 to 340 is any amino acid
  Variant (343)..(343): Xaa in position 343 is any amino acid
  Variant (345)..(348): Xaa in position 345 to 348 is any amino acid
  Variant (350)..(351): Xaa in position 350 to 351 is any amino acid
  Variant (353)..(359): Xaa in position 353 to 359 is any amino acid
  Variant (361)..(378): Xaa in position 361 to 378 is any amino acid
  Variant (379)..(389): Xaa in position 379 to 389 is any or no amino acid
  Variant (392)..(411): Xaa in position 392 to 411 is any amino acid
  Variant (412)..(413): Xaa in position 412 to 413 is any or no amino acid
  Variant (416)..(419): Xaa in position 416 to 419 is any amino acid
  Variant (422)..(425): Xaa in position 422 to 425 is any amino acid
  Variant (426)..(437): Xaa in position 426 to 437 is any or no amino acid
  Variant (439)..(441): Xaa in position 439 to 441 is any amino acid
  Variant (442)..(442): Xaa in position 442 is any or no amino acid
  Variant (445)..(451): Xaa in position 445 to 451 is any amino acid
  Variant (452)..(452): Xaa in position 452 is any or no amino acid
  Variant (454)..(457): Xaa in position 454 to 457 is any amino acid
  Variant (459)..(464): Xaa in position 459 to 464 is any amino acid
  Variant (466)..(466): Xaa in position 466 is any amino acid
  Variant (471)..(474): Xaa in position 471 to 474 is any amino acid
  Variant (475)..(475): Xaa in position 475 is any or no amino acid
  Variant (477)..(485): Xaa in position 477 to 485 is any amino acid
  Variant (486)..(515): Xaa in position 486 to 515 is any or no amino acid
  Variant (518)..(521): Xaa in position 518 to 521 is any amino acid
  Variant (524)..(542): Xaa in position 524 to 542 is any amino acid
  Variant (543)..(546): Xaa in position 543 to 546 is any or no amino acid
  Variant (548)..(549): Xaa in position 548 to 549 is any amino acid
  Variant (550)..(551): Xaa in position 550 to 551 is any or no amino acid
  Variant (553)..(560): Xaa in position 553 to 560 is any amino acid
  Variant (561)..(562): Xaa in position 561 to 562 is any or no amino acid
  Variant (564)..(564): Xaa in position 564 is any amino acid
  Variant (567)..(567): Xaa in position 567 is any amino acid
  Variant (569)..(569): Xaa in position 569 is any amino acid
  Variant (570)..(572): Xaa in position 570 to 572 is any or no amino acid
  Variant (575)..(575): Xaa in position 575 is any amino acid
  Variant (579)..(585): Xaa in position 579 to 585 is any amino acid
  Variant (586)..(590): Xaa in position 586 to 590 is any or no amino acid
  Variant (592)..(594): Xaa in position 592 to 594 is any amino acid
IXXXXXXXXXXXXXXXXXXXXXXXXXXXXXXXPXXXXXXXXXXXXXXXXXXXXXXXAXXXAXXAXXXXXXXXWXXXXXXXXXXXXXXXXXXXXXXXXXRXXXLXXXXXXXXXXXXXXXAXXXXXXXXXXXXXXXGKXXXXXXXXXXXXXXXXXXXXXXXXXXXXXXXXXXXXXXXXXXXXXXXXXXXXPXGVXXXIXPWNXPXXXXXXKXXPALAXGXXXXXKXXEXXXXXXLXXXXXXXXXGXXPXGVXNXXXGXXXXXXXXXGXXXXXHXXXXKXXFTGSXXXGXXXXXXXXXXXXXKXXXXELGGKXPXXXXXXXXXXXXDXXXAXXXXXXXXXXXXGQXCXXXXRXXVXXXXXXXFXXXXXXXXXXXXXXXXXXXXXXXXXXXXXGPXXXXXXXXXXXXXXXXXXXXXXGAXXXXGGXXXXXXXXXXXXXXXXGXXXXPTXXXXXXXXMXXXXEXXXXXXEXFGPVXXXXXFXXXXXXXXXXXXXXXXXXXXXXXXXXXXXXXXXXXXXXXANXXXXGLXXXXXXXXXXXXXXXXXXXXXXXGXXXXNXXXXXXXXXXPXGGXKXXXXSGXGREXXXXXXXXXXXXYXXXK

SEQ ID NO: 618 - protein, 19 aa, Artificial sequence
  protein pattern
  Variant (2)..(2): Xaa in position 2 is Ile, Leu or Pro
  Variant (4)..(4): Xaa in position 4 is any amino acid
  Variant (5)..(6): Xaa in position 5 to 6 is any or no amino acid
  Variant (8)..(8): Xaa in position 8 is Cys or Asn
  Variant (9)..(9): Xaa in position 9 is Ala, Cys, Ser, Thr or Val
  Variant (10)..(10): Xaa in position 10 is any amino acid
  Variant (11)..(11): Xaa in position 11 is Ile or Val
  Variant (12)..(12): Xaa in position 12 is any amino acid
  Variant (14)..(14): Xaa in position 14 is any amino acid
  Variant (15)..(15): Xaa in position 15 is Ala, Asp, Pro, Ser or Thr
  Variant (16)..(17): Xaa in position 16 to 17 is any amino acid
  Variant (18)..(18): Xaa in position 18 is Ala, Gly, Ser or Thr
  Variant (19)..(19): Xaa in position 19 is Ala, Pro or Ser
AXAXXXGXXXXXKXXXXXX

SEQ ID NO: 619 - protein, 15 aa, Artificial sequence
  protein pattern
  Variant (2)..(3): Xaa in position 2 to 3 is any amino acid
  Variant (4)..(4): Xaa in position 4 is any or no amino acid
  Variant (6)..(6): Xaa in position 6 is Ala, Cys, Gly, Thr or Val
  Variant (7)..(8): Xaa in position 7 to 8 is any amino acid
  Variant (10)..(10): Xaa in position 10 is any amino acid
  Variant (11)..(11): Xaa in position 11 is Ala or Pro
  Variant (12)..(12): Xaa in position 12 is Phe, Trp or Tyr
  Variant (14)..(14): Xaa in position 14 is any amino acid
PXXXVXXXIXXXNXP

SEQ ID NO: 620 - protein, 18 aa, Artificial sequence
  protein pattern
  Variant (2)..(4): Xaa in position 2 to 4 is any amino acid
  Variant (5)..(5): Xaa in position 5 is Phe, Leu, Met or Val
  Variant (10)..(10): Xaa in position 10 is any amino acid
  Variant (11)..(11): Xaa in position 11 is Ala, Cys, Asp, Gly, Asn or Ser
  Variant (12)..(12): Xaa in position 12 is Ala, Pro or Ser
  Variant (13)..(13): Xaa in position 13 is any amino acid
  Variant (14)..(14): Xaa in position 14 is Phe, Ile, Leu or Val
  Variant (15)..(17): Xaa in position 15 to 17 is any amino acid
KXXXXELGGXXXXXXXXD

SEQ ID NO: 621 - protein, 12 aa, Artificial sequence
  protein pattern
  Variant (2)..(2): Xaa in position 2 is any amino acid
  Variant (5)..(5): Xaa in position 5 is any amino acid
  Variant (7)..(7): Xaa in position 7 is any amino acid
  Variant (10)..(10): Xaa in position 10 is any amino acid
  Variant (12)..(12): Xaa in position 12 is Lys or Arg
PXGGXKXSGXGX

SEQ ID NO: 622 - protein, 21 aa, Artificial sequence
  protein pattern
  Variant (2)..(5): Xaa in position 2 to 5 is any amino acid
  Variant (6)..(7): Xaa in position 6 to 7 is any or no amino acid
  Variant (10)..(10): Xaa in position 10 is any amino acid
  Variant (11)..(11): Xaa in position 11 is Ala, Ser or Thr
  Variant (12)..(13): Xaa in position 12 to 13 is any amino acid
  Variant (16)..(16): Xaa in position 16 is any amino acid
  Variant (17)..(17): Xaa in position 17 is Ala, Gly or Ser
  Variant (18)..(20): Xaa in position 18 to 20 is any amino acid
  Variant (21)..(21): Xaa in position 21 is Gly, Ser or Thr
EXXXXXXANXXXXGLXXXXXX

SEQ ID NO: 623 - DNA, 1434 bp, Escherichia coli
  CDS (1)..(1434): transl_table=11
atgcgattttccagatttatcatcggattgaccagctgtatagcgttcagtgttcaggccgcaaatgttgatgagtacattactcaactccccgctggtgccaaccttgccctgatggtgcaaaaagtcggcgcgtcggcccccgctattgattaccacagtcagcagatggcgctgcctgccagtacccagaaagtgattactgcgctggcggcgttgattcgactcggccccgattttcgttttaccacgacgcttgaaaccaaaggcaatgtggaaaacggcgtacttaagggtgacttagtggcgcgatttggtgccgatccgacgttaaaacgtcaggatattcgcaatatggtcgcgactttgaaaaaatctggcgtcaaccaaatcgatggcaatgtgttgatagatacctccattttcgccagccacgataaagcccccggctggccatggaatgacatgacacaatgctttagcgctccgcctgccgccgccatagttgaccgcaactgtttctccgtctcgctctacagtgccccaaagcctggtgatatggcttttatacgcgtggcatcttattaccccgttacgatgttcagccaggtacgcaccctcccccgtggttctgccgaagcgcaatactgcgaactggatgtggtgccaggcgacctgaaccgctttacgctgacgggatgcctgccacaacgttctgagccgctcccgttggcttttgccgtgcaggatggagccagctatgccggtgcaattctgaaagatgagttaaaacaggcgggtatcacctggagcggaacactgctgcgccagactcaggttaacgaacctggaacggtagttgccagtaaacagtcggccccgctgcacgatctgcttaagattatgctgaaaaagtcggacaacatgatcgccgatacggttttccgcatgataggccatgcgcgcttcaatgtgcctggaacatggcgggccgggtcggacgccgtgcgtcagatcctgcgccagcaagccggtgtcgatattggaaacaccattattgccgatggttcagggctttcgcggcataacctgattgcccccgccaccatgatgcaggtgctgcaatacattgcccaacacgacaatgaacttaactttatctccatgctgccgctggcgggctatgacggctctttgcagtaccgtgcaggtctgcatcaggcgggcgtggatggaaaagtctcagcgaaaaccggttcgttgcagggggtatataacctggcgggattcattaccacagcgagcgggcaacgaatggcgtttgtgcaatatctttctggctatgcagtagaacctgcggatcagcgtaatcgccgtattccgttagtgcgttttgaaagccgtttgtataaagatatttatcagaacaattaa

SEQ ID NO: 624 - protein, 477 aa, Escherichia coli
MRFSRFIIGLTSCIAFSVQAANVDEYITQLPAGANLALMVQKVGASAPAIDYHSQQMALPASTQKVITALAALIRLGPDFRFTTTLETKGNVENGVLKGDLVARFGADPTLKRQDIRNMVATLKKSGVNQIDGNVLIDTSIFASHDKAPGWPWNDMTQCFSAPPAAAIVDRNCFSVSLYSAPKPGDMAFIRVASYYPVTMFSQVRTLPRGSAEAQYCELDVVPGDLNRFTLTGCLPQRSEPLPLAFAVQDGASYAGAILKDELKQAGITWSGTLLRQTQVNEPGTVVASKQSAPLHDLLKIMLKKSDNMIADTVFRMIGHARFNVPGTWRAGSDAVRQILRQQAGVDIGNTIIADGSGLSRHNLIAPATMMQVLQYIAQHDNELNFISMLPLAGYDGSLQYRAGLHQAGVDGKVSAKTGSLQGVYNLAGFITTASGQRMAFVQYLSGYAVEPADQRNRRIPLVRFESRLYKDIYQNN

SEQ ID NO: 625 - DNA, 1434 bp, Escherichia coli
  CDS (1)..(1434): transl_table=11
atgcgattttccagatttatcatcggattgaccagctgtatagcgttcagtgttcaggccgcaaatgttgatgagtacattactcaactccccgctggtgccaaccttgccctgatggtgcaaaaagtcggcgcgtcggcccccgctattgattaccacagtcagcagatggcgctgcctgccagtacccagaaagtgattactgcgctggcggcgttgattcaactcggccccgattttcgttttaccacgacgcttgaaaccaaaggcaatgtggaaaacggcgtacttaagggtgacttagtggcgcgatttggtgccgatccgacgttaaaacgtcaggatattcgcaatatggtcgcgactttgaaaaaatctggcgtcaaccaaatcgatggcaatgtgttgatagatacctccattttcgccagccacgataaagcccccggctggccatggaatgacatgacacaatgctttagcgctccgcctgccgccgccatagttgaccgcaactgtttctccgtctcgctctacagtgccccaaagcctggtgatatggcttttatacgcgtggcatcttattaccccgttacgatgttcagccaggtacgcaccctcccccgtggttctgccgaagcgcaatactgcgaactggatgtggtgccaggcgacctgaaccgctttacgctgacgggatgcctgccacaacgttctgagccgctcccgttggcttttgccgtgcaggatggagccagctatgccggtgcaattctgaaagatgagttaaaacaggcgggtatcacctggagcggaacactgctgcgccagactcaggttaacgaacctggaacggtagttgccagtaaacagtcggccccgctgcacgatctgcttaagattatgctgaaaaagtcggacaacatgatcgccgatacggttttccgcatgataggccatgcgcgcttcaatgtgcctggaacatggcgggccgggtcggacgccgtgcgtcagatcctgcgccagcaagccggtgtcgatattggaaacaccattattgccgatggttcagggctttcgcggcataacctgattgcccccgccaccatgatgcaggtgctgcaatacattgcccaacacgacaatgaacttaactttatctccatgctgccgctggcgggctatgacggctctttgcagtaccgtgcaggtctgcatcaggcgggcgtggatggaaaagtctcagcgaaaaccggttcgttgcagggggtatataacctggcgggattcattaccacagcgagcgggcaacgaatggcgtttgtgcaatatctttctggctatgcagtagaacctgcggatcagcgtaatcgccgtattccgttagtgcgttttgaaagccgtttgtataaagatatttatcagaacaattaa

SEQ ID NO: 626 - protein, 477 aa, Escherichia coli
MRFSRFIIGLTSCIAFSVQAANVDEYITQLPAGANLALMVQKVGASAPAIDYHSQQMALPASTQKVITALAALIQLGPDFRFTTTLETKGNVENGVLKGDLVARFGADPTLKRQDIRNMVATLKKSGVNQIDGNVLIDTSIFASHDKAPGWPWNDMTQCFSAPPAAAIVDRNCFSVSLYSAPKPGDMAFIRVASYYPVTMFSQVRTLPRGSAEAQYCELDVVPGDLNRFTLTGCLPQRSEPLPLAFAVQDGASYAGAILKDELKQAGITWSGTLLRQTQVNEPGTVVASKQSAPLHDLLKIMLKKSDNMIADTVFRMIGHARFNVPGTWRAGSDAVRQILRQQAGVDIGNTIIADGSGLSRHNLIAPATMMQVLQYIAQHDNELNFISMLPLAGYDGSLQYRAGLHQAGVDGKVSAKTGSLQGVYNLAGFITTASGQRMAFVQYLSGYAVEPADQRNRRIPLVRFESRLYKDIYQNN

SEQ ID NO: 627 - DNA, 1464 bp, Vibrio cholerae O1 biovar eltor str. N16961
  CDS (1)..(1464): transl_table=11
ttggtggatgttattgctatgctttttcgcttcatacctgtttggttactctctattagcggttttctaatagcctctccgatttacgcacaaacaccattgactgccgcaacgactaaacttcctcaaggggcacgttatagcctattgattgaagatgtcgcattacagcagaacactctcgaactcaatactcatctgtactatccccccgctagcacccagaagattttgacggcactcgccgcaaaattagaactgggtgataagtttcgctttcacactgatttaatgcgttcagggcaagattggatcattcgcttttcaggcgaccccaccctgaccaccgcagatttaacgacattgctcaaagcgatgaaagcgcaaagtggcggtaggattgagggcgatttgtggctggataatagtgtatttagtggatatgagcgtgcggtaggctggccatgggatattttaggcgtctgctatagcgccccagccagtgccatcaacctcgatgctaactgtatccaggcgtctatttataccgaaccacaaggtaaaacgcgcgtttatgtaccagagcactaccctgtgcatgttcagtcgcaagccatcagcgtgacacagagcgaacaagagagtttactgtgtgacttagaactgacggcaacgcctgagaatcactatacgctggatggctgtttagccctacgagacaaacccttaccactaaaatttgcggtgcaagatactgggatctacacccagcgagtggtctatcgtctcctcagccagctaaacatcgagctcaaagggaagataaaagtcggtaaagcaaataccaaacaagcgcagaaaatcgcttctcatcactcccagccgctgcctgtgttactgaaaaccatgttgcaagagtccgacaacctgatcgccgataccttgaccaaagccttgggacaccgtttttactctcaacccggtagctttaccaacggaacacaagccattaaacagattttttactcgcgcacgggcatttcattagaagatactcagctcgccgatggctctggcctttcacgtaataaccggatgcgtccacaagtgatgctggaaactcttcgctacctttatcagcacgaagctgagcttggtttaattgctatgctgccttcagcgggagaatcgggcactttgcaatatcgacgcagtatgcgtgcgccgcaaatcagtggccaaattaaagcgaaaagtggttcactttatggcacttacaatatggcgggctttgtgatggacgaaaatcagcgccctaagactctgtttgttcaattcgtcaccgactatttccctccgagatccaatcctgaggtagcggttgagccgccgattatccagtttgaaactcagctctatcaagagcttattcagtttaatcgtttggcatctaagccaaactag

SEQ ID NO: 628 - protein, 487 aa, Vibrio cholerae O1 biovar eltor str. N16961
MVDVIAMLFRFIPVWLLSISGFLIASPIYAQTPLTAATTKLPQGARYSLLIEDVALQQNTLELNTHLYYPPASTQKILTALAAKLELGDKFRFHTDLMRSGQDWIIRFSGDPTLTTADLTTLLKAMKAQSGGRIEGDLWLDNSVFSGYERAVGWPWDILGVCYSAPASAINLDANCIQASIYTEPQGKTRVYVPEHYPVHVQSQAISVTQSEQESLLCDLELTATPENHYTLDGCLALRDKPLPLKFAVQDTGIYTQRVVYRLLSQLNIELKGKIKVGKANTKQAQKIASHHSQPLPVLLKTMLQESDNLIADTLTKALGHRFYSQPGSFTNGTQAIKQIFYSRTGISLEDTQLADGSGLSRNNRMRPQVMLETLRYLYQHEAELGLIAMLPSAGESGTLQYRRSMRAPQISGQIKAKSGSLYGTYNMAGFVMDENQRPKTLFVQFVTDYFPPRSNPEVAVEPPIIQFETQLYQELIQFNRLASKPN

SEQ ID NO: 629 - DNA, 1464 bp, Pasteurella multocida subsp. multocida str. Pm70
  CDS (1)..(1464): transl_table=11
atgtataaaatatcttctttttttactgccacgcttttacgccttttcaaacgaacgatacttatatgtagtttactcgtcagtcatttcagttatgctgagattgatcttgctgaaatcaacgctcatttacccgaagggaccagcctaggttttgtggctaaaaacttaaatcgtaatgaaaaaattgtagaacaccaagccagtacttttatgttacccgccagtacacaaaaagtgctcaccgccttaaccgccaaactcgtactcagtgaccaatttcaatttgaaaccagtctattaaccaatggaaaaataaaaaacaatgaaatgcatggtgatctcatcgtacgttttacaggtgaccccgatctcaccagtggtcagctttaccaacttttcgcccaattaaaaaaacagcgtatccaaaaaatcagtggtgatattattttagatacctcagtatttagcagtcatgatcgtggtttaggttggatctggaatgacttaaccatgtgtttcaatgcaccgcctgctgcggtaaacattgataataactgtttttatgttgagttagatgcgaattatgcaccgggtgagcaagcgaagatccatgttcctgcgcaatatcctgtacaggtttttggtcaagtctatatttcaacgcctaaagaggctgggtattgccaacttgatgccaccgtacttgataataatcgttaccagttaaaaggatgcttagcacgccaaaacaaaccctttggtctgagttttgcgatccaagatccgaatgcctatgcggcaaccattattcagcgacacctcaaaaaattaggaatcgcttttaatggtaaaatcaaacagccttatcaggcgcaaaaaggacaattattagcacagcatctctctaagcccttacctgatttaatcaaaaaaatgatgaaaaaatcagataaccaaattgccgatgccttattccgtactatcgcttatcaatattatcagcgccccgcttcatttcctttggctagccaagccatgcgacagattttacaaaccaaagcaggaattaaatttggtcatgccattattgcagatggctccggcttatcacgtcataatttactctctgctgacattttattacaagcattggaatacattgcaaaacatgaagcacagttacagctcatggatacttttccaattgcggctgtggatggcacattaacgggacgaggttctctcattcatgaacccttagcgaaaaatttaattgccaaaacaggcgctctcaaaggtgtgtataatctcgccggctttatgaccaataaaaaaggggaaaaagttgcttttgtgcaatttattaatggctattctactggcgactttgagcgcaaaacaaaacgggcgcctttagttcaatttgaaagccaaatctacaatcgcctttatgaacactaa

SEQ ID NO: 630 - protein, 487 aa, Pasteurella multocida subsp. multocida str. Pm70
MYKISSFFTATLLRLFKRTILICSLLVSHFSYAEIDLAEINAHLPEGTSLGFVAKNLNRNEKIVEHQASTFMLPASTQKVLTALTAKLVLSDQFQFETSLLTNGKIKNNEMHGDLIVRFTGDPDLTSGQLYQLFAQLKKQRIQKISGDIILDTSVFSSHDRGLGWIWNDLTMCFNAPPAAVNIDNNCFYVELDANYAPGEQAKIHVPAQYPVQVFGQVYISTPKEAGYCQLDATVLDNNRYQLKGCLARQNKPFGLSFAIQDPNAYAATIIQRHLKKLGIAFNGKIKQPYQAQKGQLLAQHLSKPLPDLIKKMMKKSDNQIADALFRTIAYQYYQRPASFPLASQAMRQILQTKAGIKFGHAIIADGSGLSRHNLLSADILLQALEYIAKHEAQLQLMDTFPIAAVDGTLTGRGSLIHEPLAKNLIAKTGALKGVYNLAGFMTNKKGEKVAFVQFINGYSTGDFERKTKRAPLVQFESQIYNRLYEH

SEQ ID NO: 631 - DNA, 1431 bp, Pseudomonas aeruginosa PAO1
  CDS (1)..(1431): transl_table=11
atgttcaagtcgctgcgtactcttgccttcgccacgctcctgcctttcgcccttcccaccctcgcccaggtcaacgccaccctgccggccaacgtgcagaaagccctgcagaccaacaagctgaccggcaacgatctgtcgctggtgctgattccgctcgacggcccgggcaaccccacctactacaacgccgacgtatcggtgaacccggcctcgaccatgaagctgttcaccacctatgccgccctggaaatgctcggcccgacctaccagtggaagaccgagttctacaccgacggccagctcaagaacggagtgctcaacggcaacctctacctcaagggcggcggcgatccgaaactgaacatggagaagctctggctgctgatgcgcgacctgcgcgccaatggcgtgaccaaggtcacaggtgacctggtactcgaccgcagctacttcaacatcccgcagttgccggtattcaacgacgacggcggcgacgacaccaagccgttcctggtcggtccggactcgctgctggtcaacctgaagagcgtgcgcatggtggtgcgcaccgacggcaacaaggtcaacgtgcagatggacccgccgctggccaacgtacgcatcgacaaccaggtgaagatgaccgcgccggccacctgcccggcctggccgaagctgcgcttcagcccggtgacccagttcgacggcaccaccctgctggccaccggacagattccccagggctgtagcgcgcagacctacatgtcgctgctcgaccaccccggctacaccgccggcgcggtgcgcggcatctggcaggagctgggcggcagcatcctcggcaaggaccgccagggcagcgtaccgcgcaacgccacgctgatcgccaaggccttctcgccagacctggtcgagatcatccgcgacatcaacaaatacagtaacaacaccatggcccggcagttgttcctctccatcggcgcgcagttccgcaacagtgccgacggcgacgacgcccaggccgcgcagcgggtggtgcggcagtggctggcgcgcaagggcatcaccgcgccgcgcctggtgatggagaacggctcgggactgtcgcgccaggaacgggtcagcgcccgtgagatggcggcgatgctgcaagccgcctggcacagcccctatgcagcggagtacatctcctcgctgccgctggccggcctcgacggcaccatgcgcaaacgcctgcggcgcaccgcactggtcggcgaggcgcacgtgaagaccggcaccctcaacaccgtgcgcgccctcgccggcttcagccgcgacgccagcggccacaactgggtggtggtggcgatcctcaacagcccgcggccgtggggcgcttcggcgatcctcgaccaggtactgctgagcctgcacgcgcggaaataa

SEQ ID NO: 632 - protein, 476 aa, Pseudomonas aeruginosa PAO1
MFKSLRTLAFATLLPFALPTLAQVNATLPANVQKALQTNKLTGNDLSLVLIPLDGPGNPTYYNADVSVNPASTMKLFTTYAALEMLGPTYQWKTEFYTDGQLKNGVLNGNLYLKGGGDPKLNMEKLWLLMRDLRANGVTKVTGDLVLDRSYFNIPQLPVFNDDGGDDTKPFLVGPDSLLVNLKSVRMVVRTDGNKVNVQMDPPLANVRIDNQVKMTAPATCPAWPKLRFSPVTQFDGTTLLATGQIPQGCSAQTYMSLLDHPGYTAGAVRGIWQELGGSILGKDRQGSVPRNATLIAKAFSPDLVEIIRDINKYSNNTMARQLFLSIGAQFRNSADGDDAQAAQRVVRQWLARKGITAPRLVMENGSGLSRQERVSAREMAAMLQAAWHSPYAAEYISSLPLAGLDGTMRKRLRRTALVGEAHVKTGTLNTVRALAGFSRDASGHNWVVVAILNSPRPWGASAILDQVLLSLHARK

SEQ ID NO: 633 - DNA, 1434 bp, Salmonella typhimurium LT2
  CDS (1)..(1434): transl_table=11
atgcgattttccagatttatcatcggattgaccaccagtatagcgttcagcgttcaggccgcgaatattgacgaatacatcaaacagcttccggccggcgccaacctcgcgctgatggtgcaaaagattggcgcgcccgcgccggctattgattatcatagtcagcagatggcgcttcccgccagtacccaaaaggtgattaccgcgctggcggcgctgattcaactcggcccggatttccgttttacgaccacgctggagactaaaggcaacgtcgataacggcatcctgaaaggtgacgtaattgcgcgcttcggtggcgatccaacgctaaaacgtcaggatattcgcaatatggtcgcgacgctgaaaaagtccggcgtcacgcaaatcgacggcaatgtgcttatcgacacgtcgattttcgccagccacgataaagcgccaggctggccgtggaacgacctgacgcagtgtttcagcgcgcctcccgccgccgccattgttgaccgcaactgtttttctgtgtcgctttatagcgcgcaaaaaccaaacgatttagcctttattcgcgtggcctcttattatccggtaacgatgttcagccaggtacggactctaccgcgcggttcggcagacgcgcagtattgcgagctggatgttgtgcctggcgatttgaaccgttatacgcttaccggctgtttaccacagcgcgccgacccgctgccgctggcctttgctattcaggacggcgccagctacgcgggcgcgatcctcaagcaggaactgaaagaggccgggataacttaccgcggcacgctgctgcgccagacgcaggttaacgagcccggaacgatcgtcgccagtaaacagtcggcgccactgcacgatctgcttaagattatgctgaaaaagtcagacaacatgatcgccgatactgtttttcggatgattggtcatgtcaggtttaacgtgcctggcacctggcgggcgggatcggatgccgttcgccagatcctgcgccaacaggcgggaattgatatcggcaataccattattgccgacggttccggtctttctcgccataatctgatcgctcccgccacgatgatgcaggtgctgcaatatatcgcccaacacgataacgagctgaactttatctctatgctgccgctggcgggctatgatggttcattacaataccgcgccgggctgcatcaggcgggcgtagacggtaaggtttcagcgaaaaccggatcactgcagggcgtgtataatctggcgggctttattaccaccgcaagcgggcaacggatggcatttgtacaatatttgtccggctacgcggttccacctgccgatcagcgtaatcgccgaatcccgctggtacgcttcgagagtcggttgtataaggatatttatcagaataactga

SEQ ID NO: 634 - protein, 477 aa, Salmonella typhimurium LT2
MRFSRFIIGLTTSIAFSVQAANIDEYIKQLPAGANLALMVQKIGAPAPAIDYHSQQMALPASTQKVITALAALIQLGPDFRFTTTLETKGNVDNGILKGDVIARFGGDPTLKRQDIRNMVATLKKSGVTQIDGNVLIDTSIFASHDKAPGWPWNDLTQCFSAPPAAAIVDRNCFSVSLYSAQKPNDLAFIRVASYYPVTMFSQVRTLPRGSADAQYCELDVVPGDLNRYTLTGCLPQRADPLPLAFAIQDGASYAGAILKQELKEAGITYRGTLLRQTQVNEPGTIVASKQSAPLHDLLKIMLKKSDNMIADTVFRMIGHVRFNVPGTWRAGSDAVRQILRQQAGIDIGNTIIADGSGLSRHNLIAPATMMQVLQYIAQHDNELNFISMLPLAGYDGSLQYRAGLHQAGVDGKVSAKTGSLQGVYNLAGFITTASGQRMAFVQYLSGYAVPPADQRNRRIPLVRFESRLYKDIYQNN

SEQ ID NO: 635 - DNA, 1524 bp, Shewanella oneidensis MR-1
  CDS (1)..(1524): transl_table=11
atggaaacgttttcccgattattcaccttacctcgttcaacgggcttactgctaacggtagttgcaactgccctattcccaagtaatgtgtgggcagctgccgcagatattaagcatactacgcttgaccaacaaatgagtgatatagcgccgtctcattcgcaaattgcgttacttgcccatgatatgtcgaacgacaagcagctttacagccagcaagccgataccttgtttatccctgccagcacccaaaaagtgcttaccgctgtcacggccttagctgcacttggaccagaatttagctatgtgacagatctttggagtgatgccccaatccgccagggacatgttgaagggagtgtatatttacgctttagcggcgatcccacattaacccacgaggatttgaaggctttattcgctcagctacaaaaactgggcataaagcgaattgaggggcacttatatcttgttggagataaacaagaacaattacaagcgcctggctgggtttgggacgatctcggcatttgttttgcggcaccagtgtcgagctacatcatcaatcaaaactgtgtatatgggcagtttgtgccaagctctgcaaaacaaacgtctcgggtaacattaagcgcgaacagttatggtgttaacgtcagcagtgatgcaattttttcccctcaagcgaatcatgatttttgccaacttgatttagtccgcttaagccaaaatcaatatcatctgcggggctgttatcccggcagtgaagccataccgctcgcgatcgcgattagcgatccgcaaaaatttgccatcgacaccttaacggccacgctaaaaggaaaaatttccctctcgggcaaagttaaaattggccatgatatccctgataaggcaaaacttattgccagccatcgcagtgcgccattgcccgagctattaaagacgatgttacttaagtcggacaacctgatcgctgacagtttgtttaaacgtgtagggcaagactattataaaactcaggggagttttacttatggcgcggcggccatgcgacatattctgactgagttagggattgacttaaccaatgccaatatcgtcgatggttctgggctttctcgctataacttgttgagtgctaagcaattagctgatgtgcttacactcatgtatcaagatgctcgctttcacagcttgattgatagtttgcccgaggcaggagtcagcggtacgctaaaatatcgacagggttacactcaaccaccactcaaaaaccgtgtttttgccaaaacaggttcaatgcaaggggttgccaatttagctggttttattcgaataccacaacagcgggatatcttatttgtggtacttgagaatggcataagccctgaaacgaaaaaacaacgcaaacctgcgtttagcgcggactttttaactcgactaatggccacagttgaacagcaagcacacactagccaaacatctgtcaaagaacttaacacggttaaaaaaattaactga

SEQ ID NO: 636 - protein, 507 aa, Shewanella oneidensis MR-1
METFSRLFTLPRSTGLLLTVVATALFPSNVWAAAADIKHTTLDQQMSDIAPSHSQIALLAHDMSNDKQLYSQQADTLFIPASTQKVLTAVTALAALGPEFSYVTDLWSDAPIRQGHVEGSVYLRFSGDPTLTHEDLKALFAQLQKLGIKRIEGHLYLVGDKQEQLQAPGWVWDDLGICFAAPVSSYIINQNCVYGQFVPSSAKQTSRVTLSANSYGVNVSSDAIFSPQANHDFCQLDLVRLSQNQYHLRGCYPGSEAIPLAIAISDPQKFAIDTLTATLKGKISLSGKVKIGHDIPDKAKLIASHRSAPLPELLKTMLLKSDNLIADSLFKRVGQDYYKTQGSFTYGAAAMRHILTELGIDLTNANIVDGSGLSRYNLLSAKQLADVLTLMYQDARFHSLIDSLPEAGVSGTLKYRQGYTQPPLKNRVFAKTGSMQGVANLAGFIRIPQQRDILFVVLENGISPETKKQRKPAFSADFLTRLMATVEQQAHTSQTSVKELNTVKKIN

SEQ ID NO: 637 - DNA, 1431 bp, Vibrio vulnificus CMCP6
  CDS (1)..(1431): transl_table=11
atgcgttttctcgcttcacttttcacatcgagcttttgcttcttgcttgctacttcttccaccattcaggcagaagaatactcaccgctaagcaacctcccagatggcagtagaagcagtatttgggtagaagacttacaaaaccaaacctcttggcaaaccttagcgcaaaatacccgttttttccctccagcaagcacactcaaactggccaccgccctagcggccaaactggaacttgaagacgactttgccttcaccaccgaactgttaagcaatggccgtgacatcagcattcgtttctctggcgatcccacgcttaaaaccgcacatttaaaacagcttttagaagcctacaagcagcagaatggcgcgaacattcgtggagacctttggctcgataactcggtgtttacaggctatgagcgcgctgtgggttggccttgggatattttgggtgtttgctacagtgctccttcaagtgccatcacattagatgagaactgcgctcaggcttctatttacacattggccgatggcaatactcgagtttacgtgccagagcagtacccgattcacgtcacaaccaatgcgaaaaccgtctctaaagcgatccagcagagtaatcattgcgacttagagctgttgacgggggataacaaccaatatcaattgcaaggctgtctggttgagagagacaaaccgttaccccttaagttcgcgattcaagactcaactcaatacacgagtcgaaccttatataccttgttgagacagctcaaaattgaacttggtggagaaattaaaattggcgtcatgccgaacaaagccaatgtcattgccagccactcttcagctaccttgccagagttattagacaccatgttaaaggactctgataatcttattgccgacaaccttaccaaagcgattggggctcgcttttacttgcaacccggtagctttgccaatggcactgaagcggtgaaacagatcctttattccaaagcgggaatcgatctttctcgcgctcaactcgccgacggttcgggcttgtcgcgtaataatcgaatcaaccctatggatatgatgtcgatcttaaaatacatctggcaacacgacaaagagctcggtttagtggcattaatgcccaaatccggagagtccggcaccctcaagtaccgccaaagcatgcgcagtgatccagttaaagggcagatcgtcgctaaaagtggctcactttatggcagctataatatggcaggatttgttttagatcagaatggacagccaagcgccgccttcattcaatttattaccgattactaccctgataaaagtgaagagagtggtaatgttgcgcctatcacacgcttcgagcgtgagttttatcgagacttagttgagtttacacaagtaaaacacaactga

SEQ ID NO: 638 - protein, 476 aa, Vibrio vulnificus CMCP6
MRFLASLFTSSFCFLLATSSTIQAEEYSPLSNLPDGSRSSIWVEDLQNQTSWQTLAQNTRFFPPASTLKLATALAAKLELEDDFAFTTELLSNGRDISIRFSGDPTLKTAHLKQLLEAYKQQNGANIRGDLWLDNSVFTGYERAVGWPWDILGVCYSAPSSAITLDENCAQASIYTLADGNTRVYVPEQYPIHVTTNAKTVSKAIQQSNHCDLELLTGDNNQYQLQGCLVERDKPLPLKFAIQDSTQYTSRTLYTLLRQLKIELGGEIKIGVMPNKANVIASHSSATLPELLDTMLKDSDNLIADNLTKAIGARFYLQPGSFANGTEAVKQILYSKAGIDLSRAQLADGSGLSRNNRINPMDMMSILKYIWQHDKELGLVALMPKSGESGTLKYRQSMRSDPVKGQIVAKSGSLYGSYNMAGFVLDQNGQPSAAFIQFITDYYPDKSEESGNVAPITRFEREFYRDLVEFTQVKHN

SEQ ID NO: 639 - DNA, 1467 bp, Pseudomonas syringae pv. tomato str. DC3000
  CDS (1)..(1467): transl_table=11
atgatcaaatcgctccgtccattgttgctcgcctcgatgcttctgccactggctctgccctcctacgccgccgtcatcaacaccacgctgcccccaaaggttcagcaggccctgaaagccagcaagcttggcgatgatgcgctctcgctggtcatgttgccgctcaatggtcccggcacacccaccgtgttcaacgccgatgtgtcggtgaacccggcgtcgaccatgaagctcatcaccacctacgccgcgctggaaatgctcggcccgacccatcagtggaaaaccgaattcttcaccgacggcaccctgagcaacggcgtgctgcgcggcaacctttacctcaaggggggcggcgaccccaagctgaacatggaaaagctctggctgctgatgcgtgacctgcgcgccaatggcgtgcagcaggtgaccggcgacctggtgctggaccgcagccatttcgtgcagccgcaattgcctgagttcaatgacgacggcaacgatgaaaacaagccgtttctggtcaaacccgacgcattgatggtcaacctcaaggcgttgcgctttgtgacgcgcaacgatgacggcagaatcctcgtgtctgtggagccgccaattgccaccattcgtgtcgataaccaggtcaaggccattgcctcgaaacaatgcacgggcgatgtgcgttacaacccggtgactcaggctgacggcagcgtcattgtgaccgtgactggccagttgggcaacggctgcaactcccagacctacctgtcgctgctcgaccacccgacctacgccgcaggcgcggtgcgggccatctggcaggaactgggcggcaccattctgggcaaggatcgcgtcggcgtcgtgccgaccaacaccaagctgctggccaaggcgttctccccggacctggtcgaagtcattcgcgatatcaacaaattcagtaacaacaccatggcccagcagctgttcctgagcctgggcgaagaattccgcaacgaagccgatggtgacgacggcaaggccgcgcagcgggtgattcgccagtggctggcgaaaaaaggcattaccgcgccgcatctggtcatggagaacggctcgggtctttcgcgtgcggagcgggtcagtgcccgcgagatggcgattatcctgcaggccgcctggcgcagcccgtatgccgccgaattcatgagttcgatgccgctggcagggcttgacggcaccatgcgcaaacgcctcaagcgtacgccgctactgggcgaggcccacatcaagaccggcaccctgaacaccgttcgcgcgattgccggtttcagccgcgacagcaatggcaacacctgggcagtcgtggcgatcctcaacgatccgcgtccgttcggggcgtcttcgattctggatgaggtgctgatcgacctgtatcgccagcccaagctggccaacaccacggtctcgatccagcagtag

SEQ ID NO: 640 - protein, 488 aa, Pseudomonas syringae pv. tomato str. DC3000
MIKSLRPLLLASMLLPLALPSYAAVINTTLPPKVQQALKASKLGDDALSLVMLPLNGPGTPTVFNADVSVNPASTMKLITTYAALEMLGPTHQWKTEFFTDGTLSNGVLRGNLYLKGGGDPKLNMEKLWLLMRDLRANGVQQVTGDLVLDRSHFVQPQLPEFNDDGNDENKPFLVKPDALMVNLKALRFVTRNDDGRILVSVEPPIATIRVDNQVKAIASKQCTGDVRYNPVTQADGSVIVTVTGQLGNGCNSQTYLSLLDHPTYAAGAVRAIWQELGGTILGKDRVGVVPTNTKLLAKAFSPDLVEVIRDINKFSNNTMAQQLFLSLGEEFRNEADGDDGKAAQRVIRQWLAKKGITAPHLVMENGSGLSRAERVSAREMAIILQAAWRSPYAAEFMSSMPLAGLDGTMRKRLKRTPLLGEAHIKTGTLNTVRAIAGFSRDSNGNTWAVVAILNDPRPFGASSILDEVLIDLYRQPKLANTTVSIQQ

SEQ ID NO: 641 - DNA, 1422 bp, Vibrio parahaemolyticus RIMD 2210633
  CDS (1)..(1422): transl_table=11
atgcgtttacgttggcctctactcatttcttctcttatttttccgctattgtcttatgcgtatcctcatcaagaggtattgccagagggcgcccgtatcagcttagttgcagaaaaactaaccgaaagttctacgctcgatggtatccgtccaacagaccaactatttccacctgcgagcaccttaaaaattgtcacagccttagctgctaaattagagttaggggacagctttgcatttcgaacaaagcttgaaacctcgagttccgatgccgttatctactttgtcggagatcccaccttacaaacccaagatttgaaagcgttgctgtcattggcgaaaaaaaatggtttaacgcgcattaacggtgacttgtggttagacaacagtgcctttacagggtatgaccgagcggtaggttggccgtgggacattctgggggtttgctacagcgctccggcttctagcattacactcaacaacaactgtgtccaagcttctatctatacgcaaaaagatggcgggactcgagtctatgtgccagagcatcaacctattcgtgttaaaagttcggtcgagaccgtttctaagacgattcaaaagagccgccattgcgatttagacctgcttgctaacccagacaatcgctacgaattaaaaggatgcttagtcgaacgagaaaagccgctgcctctcaaatttgcggttcaagatcctgaacgttacaccagtcaaaatatcagtacattactcaaacaattaggtattgagctcaaaggcaaaattaaaattggttcagcgccacagaaacaacgtaaattgatggcattacatcaatcaaagccgctatccgatttacttgatgacatgctcaagcattctgacaatttgatcgcagacacattaacgaaaacattgggtgcgaagttttttgttcaacccggaagttttaccaatggtacagaagcgatcaaacagatcattttcgccaatactggcatcgatattcgtaacgcacgcttggaagatggatcgggcctttcaagaaacaaccgtatttctgcgaacaaaatggcagaaatcctacgttatatctggaaaaacgaaaaaacactgaagctgattgccatcatgcctaaatcaggcgagtcgggtacgctgcaataccgccaaagcatgcggaatgccccaattaaaggtcaactgattgcgaagagtggttcattgtacggaacctacaacatggcgggttatggtttagataaaaatggccagccgaatactattttcgtacagtttgtctcagactacttcccagaaaaaagggacgataacaaacctgtcatcgcccctattacgcattttgagcagttattttaccgtgacatcgtgaattttagtcaggcaatacctaagaagtaa

SEQ ID NO: 642 - protein, 473 aa, Vibrio parahaemolyticus RIMD 2210633
MRLRWPLLISSLIFPLLSYAYPHQEVLPEGARISLVAEKLTESSTLDGIRPTDQLFPPASTLKIVTALAAKLELGDSFAFRTKLETSSSDAVIYFVGDPTLQTQDLKALLSLAKKNGLTRINGDLWLDNSAFTGYDRAVGWPWDILGVCYSAPASSITLNNNCVQASIYTQKDGGTRVYVPEHQPIRVKSSVETVSKTIQKSRHCDLDLLANPDNRYELKGCLVEREKPLPLKFAVQDPERYTSQNISTLLKQLGIELKGKIKIGSAPQKQRKLMALHQSKPLSDLLDDMLKHSDNLIADTLTKTLGAKFFVQPGSFTNGTEAIKQIIFANTGIDIRNARLEDGSGLSRNNRISANKMAEILRYIWKNEKTLKLIAIMPKSGESGTLQYRQSMRNAPIKGQLIAKSGSLYGTYNMAGYGLDKNGQPNTIFVQFVSDYFPEKRDDNKPVIAPITHFEQLFYRDIVNFSQAIPKK

SEQ ID NO: 643 - DNA, 1434 bp, Salmonella enterica subsp. enterica serovar Typhi Ty2
  CDS (1)..(1434): transl_table=11
atgcgattttccagatttatcatcggattgaccaccagtatagcgttcagcgttcaggccgcgaatattgacgaatacatcaaacagcttccggccggcgccaacctcgcgctgatggtgcaaaagattggcgcgcccgcgccggctattgattatcatagtcagcagatggcgcttcccgccagtacccaaaaggtgattaccgcgctggcggcgctgattcaactcggcccggatttccgttttacgaccacgctggagactaaaggcaacgtcgataacggcatcctgaaaggtgacttaattgcgcgattcggtggcgatccaacgctaagacgtcaggatattcgcaatatggtcgcgacgctgaaaaagtcaggcgtcacgcaaatcgacggcaatgtgcttatcgacacgtcgattttcgccagccacgataaagcgccaggctggccgtggaacgacctgacgcagtgtttcagcgcgcctcccgccgccgccattgttgaccgcaactgtttttctgtgtcgctttatagcgcgcaaaaaccaaacgatttagcttttattcgcgtggcctcttattatccggtaacgatgttcagccaggtacggactctgccgcgcggttcggcagacgcgcagtattgcgagctggatgttgtgcctggcgatttgaaccgttatacgcttaccggctgtttaccacagcgcgccgacccgctgccgctggcctttgctattcaggacggcgccagctacgcgggcgcgatcctcaagcaggaactgaaagaggccgggataacttaccgcggcacgctgctgcgccagacgcaggttaacgagcccggaacgatcgtcgccagtaaacagtcggcgccactgcacgatctgcttaagattatgctgaaaaagtcagacaacatgatcgccgatactgtttttcggatgattggtcatgtcaggtttaacgtgcctggcacctggcgggcgggatcggatgctgttcgccagatcctgcgccaacaggcgggaattgatatcggcaataccattattgccgacggttccggtctttctcgccataacctgatcgctcccgccacgatgatgcaggtgctgcaatatatcgcccaacacgataacgagctgaactttatctctatgctgccgctggcgggctatgacggttcattgcaataccgcgccggcctacatcaggcgggcgtagacggtaaggtttcggcgaaaaccgggtcactgcagggcgtgtacaacctggcgggctttattaccaccgcaagcgggcagcggatggcatttgtacagtatttgtccggctacgcggttccacctgccgatcagcgtaatcgacgtattccgctggtacgcttcgagagtcgattgtacaaggatatttatcagaataactga

SEQ ID NO: 644 - protein, 477 aa, Salmonella enterica subsp. enterica serovar Typhi Ty2
MRFSRFIIGLTTSIAFSVQAANIDEYIKQLPAGANLALMVQKIGAPAPAIDYHSQQMALPASTQKVITALAALIQLGPDFRFTTTLETKGNVDNGILKGDLIARFGGDPTLRRQDIRNMVATLKKSGVTQIDGNVLIDTSIFASHDKAPGWPWNDLTQCFSAPPAAAIVDRNCFSVSLYSAQKPNDLAFIRVASYYPVTMFSQVRTLPRGSADAQYCELDVVPGDLNRYTLTGCLPQRADPLPLAFAIQDGASYAGAILKQELKEAGITYRGTLLRQTQVNEPGTIVASKQSAPLHDLLKIMLKKSDNMIADTVFRMIGHVRFNVPGTWRAGSDAVRQILRQQAGIDIGNTIIADGSGLSRHNLIAPATMMQVLQYIAQHDNELNFISMLPLAGYDGSLQYRAGLHQAGVDGKVSAKTGSLQGVYNLAGFITTASGQRMAFVQYLSGYAVPPADQRNRRIPLVRFESRLYKDIYQNN

SEQ ID NO: 645 - DNA, 1434 bp, Coxiella burnetii RSA 493
  CDS (1)..(1434): transl_table=11
atgaaaaagcctttctaccttgcaattctcttaagtttattttgctcaccgctttttgctgtagaaaaacaaaacccgcaaacgaatattaatactattctgcggtccattaaatccaaagctaatttgggttttattgttagcgatgtcaaaacaggtcgtgttatttttagcgaacgctcacaatttttgttttcgccggcaagcacacaaaaattatttacggccgtagcggcactgtattatctcggctcggattatcaattcaccacggcacttctcactaacggcgccatcaaaggccaaactttgcaaggaaatttaaccctcaaattctctggcgatcctgaactgacgacagaagatttaaatcgactgatcgaaaaactaaaagaactgggcatccatcgcattagtggccatgtctacatcgataataccgcttataacgacgttccttatccgccgggttggatgttggatgatttaagttatggttatgccgctccggtgagcgccattattatcaaccgcaataaatttttattgcatattttgccggccaaaaaaggcaatgcccagccaacgctatcgcctattctccccgcgggcgtggctcatttttctaatcgcgtaagaacaactgcccatcaaattaaacagtgcccgttgactgtttacagtgataatcgcaataactatcaattggcaggctgcattaatcgcgcgtggggacagcagcgacgcacactagccattcgaaatccggttatttacgccaacgtgttactcaaacaggcgctcgctgataatgttattcagtaccaaggtccaattctcttagcaggttctagtgctaatgatgtcgtactagcggagcaaaaatcgccaccgcttcgccatatgttaaaagaaatgttgaagaattctgacaatttaacgacggattcattgctaaaaaaaatgggggaacgattttataaaaaaccaggtacttggcaaaacggactgcacgcattaaaaaaaatattagaaccgaccggtattgatttcaaaaataatttaattaatgacggtgcaggcctttcgcgttataacctcgttagtccggatcaaatggcaaaattactgcgttttgcttacaatcaaaaaaccattcgcgatcctttgttaaaagcacttcctattggcggcaaagatggaacgcttgccggacgcatgcgctccattgctaattccgaacgagtccacgctaaaaccggctcaatggcaggggtttcagccttagcgggctatttgcgaactcgccagaataaggtattatcctttgcgatcatgattaatggtttcgttggcgaaacccatgcctatagtcatttagaagatcgtctgtgcgaatttctggtaaaattttctgagcgaaaacatggataa

SEQ ID NO: 646 - protein, 477 aa, Coxiella burnetii RSA 493
MKKPFYLAILLSLFCSPLFAVEKQNPQTNINTILRSIKSKANLGFIVSDVKTGRVIFSERSQFLFSPASTQKLFTAVAALYYLGSDYQFTTALLTNGAIKGQTLQGNLTLKFSGDPELTTEDLNRLIEKLKELGIHRISGHVYIDNTAYNDVPYPPGWMLDDLSYGYAAPVSAIIINRNKFLLHILPAKKGNAQPTLSPILPAGVAHFSNRVRTTAHQIKQCPLTVYSDNRNNYQLAGCINRAWGQQRRTLAIRNPVIYANVLLKQALADNVIQYQGPILLAGSSANDVVLAEQKSPPLRHMLKEMLKNSDNLTTDSLLKKMGERFYKKPGTWQNGLHALKKILEPTGIDFKNNLINDGAGLSRYNLVSPDQMAKLLRFAYNQKTIRDPLLKALPIGGKDGTLAGRMRSIANSERVHAKTGSMAGVSALAGYLRTRQNKVLSFAIMINGFVGETHAYSHLEDRLCEFLVKFSERKHG

SEQ ID NO: 647 - DNA, 1437 bp, Bordetella parapertussis 12822
  CDS (1)..(1437): transl_table=11
atgcggcgggcaggcaaacaaggcaagtggcaacaatggctggccggcgtcatgctggcgctgggcgccgccggcgcggcggcgcagggcctgccgtccagtatggtggcggcctggaaggcgaccaagctgcccgaccagtccctttcgctggtggtgcaggagatcaacggcccgcggctggcgacgctcaacgccaaggagccgcgcaatccggcttccgtcatgaagctggtgacgacctgggccgcgctgtccgagctggggcccagctacgcgtggcgcaccgaattcctgaccgagcccggcgaccggcccgatgcccacggcgtgctgcgcgggccgctgtacctgcgcgccggcggcgacccgcaactgctgctgcaggatctgtgggccctgttgcgcgagctgcggctgcgcggcgtcaagcagatcggcgacctggtggtggaccgcagcattttcgggcaggtggccatcgatcccggcgccttcgacggcgcctccgaccgggcctacaacgccagcccggacgctctgatggtgggcttcggcgcgcaacgcctgctgttcacgcccgacgccgcggcgcgcaaatgggtgccgatgatcgatccgccgctgccgggcctgcgcctggaaggcgcggtcgagtggagcgacgtgcgttgtccggggccgccggtggtcggcaccgagccggtggtgacccagcagggcgtgtccatccgcctgagcggcaaggtggccggctcgtgcggcgagttcagcctgtaccggctggcgctgtcgcagcccgagtacgccagcgcggtgttccgcctgctctggcgcgaactgggcggcaccctcaagggccagatccgcagcggcgtcgtgccgccggacgccgtggtgctggccagccacgactcgcccaccctgggcgaggcgatccgcaccatcaacaagcgcagcaacaatgtgatggcgcgcaccctgctgctgaccctgggcgccgagcgcggccgccggcccgccaccgtcgagagcagcggcgtggtcgcccgcaccgtgctgggcgcgcaggggctggaaatgcccgaactggtgatcgacaacggctccgggctgtcgcgcgagggcagggtgtcggccgacagcctggcgtccatgctcacggtggcctggaattcgcccctgatgccggaattcatctcgtcgctggccatcgccggcgtggacgggacggtgcggcggcgcctcaagggcaacggcgcgcagggcatggcccacctgaagaccggctcgctgcgcgatgtgcgggcggtggccggctatgtgctgggggccagcggcaagcgttacgtggtggtcagcatggtcaaccacgagaacgcggccgccgtgcggtcgttcgacgacgcgctggtcgcctggctggccgaacagtga

SEQ ID NO: 648 - protein, 478 aa, Bordetella parapertussis 12822
MRRAGKQGKWQQWLAGVMLALGAAGAAAQGLPSSMVAAWKATKLPDQSLSLVVQEINGPRLATLNAKEPRNPASVMKLVTTWAALSELGPSYAWRTEFLTEPGDRPDAHGVLRGPLYLRAGGDPQLLLQDLWALLRELRLRGVKQIGDLVVDRSIFGQVAIDPGAFDGASDRAYNASPDALMVGFGAQRLLFTPDAAARKWVPMIDPPLPGLRLEGAVEWSDVRCPGPPVVGTEPVVTQQGVSIRLSGKVAGSCGEFSLYRLALSQPEYASAVFRLLWRELGGTLKGQIRSGVVPPDAVVLASHDSPTLGEAIRTINKRSNNVMARTLLLTLGAERGRRPATVESSGVVARTVLGAQGLEMPELVIDNGSGLSREGRVSADSLASMLTVAWNSPLMPEFISSLAIAGVDGTVRRRLKGNGAQGMAHLKTGSLRDVRAVAGYVLGASGKRYVVVSMVNHENAAAVRSFDDALVAWLAEQ

SEQ ID NO: 649 - DNA, 1437 bp, Bordetella bronchiseptica RB50
  CDS (1)..(1437): transl_table=11
atgcggcgggcaggcaaacaaggcaagtggcaacaatggctggccggcgtcatgctggcgctgggcgccgccggcgcggcggcgcagggcctgccgtccagtctggtggcggcctggaaggcgaccaagctgcccgaccagtccctttcgctggtggtgcaggagatcaacggcccgcggctggcgacgctcaacgccaaggagccgcgcaatccggcttccgtcatgaagctggtgacgacctgggccgcgctgtccgagctggggcccagctacgcgtggcgcaccgaattcctgaccgagcccggcaaccggcccgatgcccacggcgtgctgcgcgggccgctgtacctgcgcgccggcggcgacccgcaactgctgctgcaggatctgtgggccctgttgcgcgagctgcggctgcgcggcgtcaagcagatcggcgacctggtggtggaccgcagcattttcgggcaggtggccatcgatcccggcgccttcgacggcgcctccgaccgggcctacaacgccagcccggacgccctgatggtgggcttcggcgcgcaacgcctgctgttcacgcccgacgccgcggcgcgcaaatgggtgccgatgatcgatccgccgctgccgggcctgcgcctggaaggcgcggtcgagtggagcgacgtgcgttgtccggggccgccggtggtcggcaccgagccggtggtgacccagcagggcgtgtccatccgcctgagcggcaaggtggccggctcgtgcggcgagttcagcctgtaccggctggcgctgtcgcagcccgagtacgccagcgcggtgttccgcctgctctggcgcgaactgggcggcaccctcaagggccagatccgcagcggcgtcgtgccgccggacgccgtggtgctggccagccacgactcgcccaccctgggcgaggcgatccgcaccatcaacaagcgcagcaacaatgtgatggcgcgcaccctgctgctgaccctgggcgccgagcgcggccgccggcccgccaccgtcgagagcagcggcgtggtcgcccgcaccgtgctgggcgcgcaggggctggaaatgcccgaactggtgatcgacaacggctccgggctgtcgcgcgagggcagggtgtcggccgacagcctggcgtccatgctcacggtggcctggaattcgcccctgatgccggaattcatctcgtcgctggccatcgccggcgtggacgggacggtgcggcggcgcctcaagggcaacggcgcgcagggcatggcccacctgaagaccggctcgctgcgcgatgtgcgggcggtggccggctatgtactgggggccagcggcaagcgttacgtggtggtcagcatggtcaaccacgagaacgcggccgccgtgcggtcgttcgacgacgcgctggtcgcctggctggccgaacagtga

SEQ ID NO: 650 - protein, 478 aa, Bordetella bronchiseptica RB50
MRRAGKQGKWQQWLAGVMLALGAAGAAAQGLPSSLVAAWKATKLPDQSLSLVVQEINGPRLATLNAKEPRNPASVMKLVTTWAALSELGPSYAWRTEFLTEPGNRPDAHGVLRGPLYLRAGGDPQLLLQDLWALLRELRLRGVKQIGDLVVDRSIFGQVAIDPGAFDGASDRAYNASPDALMVGFGAQRLLFTPDAAARKWVPMIDPPLPGLRLEGAVEWSDVRCPGPPVVGTEPVVTQQGVSIRLSGKVAGSCGEFSLYRLALSQPEYASAVFRLLWRELGGTLKGQIRSGVVPPDAVVLASHDSPTLGEAIRTINKRSNNVMARTLLLTLGAERGRRPATVESSGVVARTVLGAQGLEMPELVIDNGSGLSREGRVSADSLASMLTVAWNSPLMPEFISSLAIAGVDGTVRRRLKGNGAQGMAHLKTGSLRDVRAVAGYVLGASGKRYVVVSMVNHENAAAVRSFDDALVAWLAEQ

SEQ ID NO: 651 - DNA, 1392 bp, Chromobacterium violaceum ATCC 12472
  CDS (1)..(1392): transl_table=11
atggcaatcgcgaagtggccggtcttgctggcgctggcctgcgcgccggcgctcgcgctggatctgcatggcctgaagccggatgagattgcggtctgggcggcgccggtggagggcgacgctccggcgataacccatagggcggacgcgccggtgaatccggcgtcgacgatgaagctgctgaccggctgggcggcgctcaaccgcctggggccggattaccgctggaagacggcgttgctgtcggccgcgccggtggaaggcggcgcgctgaagggcgatctgtactggctgggcggcggcgatccgcgcttcgacaacggcgacctgctgagcctgctgtacagtctgcggctgcgcggcatccgccagctggacgggcgcctgctgctggacaagcgcgccttcggcaatgtcggcggcgccgatgatttcgacggcgacgccgggcgggccttcgtcgtcggcccggatgcccatctgaccaatctgaaggtcgcctggctgacttttttcaacgacggacagggcgcgcgcgtcgcgctggacccgccgctggccggcgtagagctgcgcgcggcgctgacgccgggcccggaccagccttgcgcggacgtgcgccgcttcgtctccatcgacaacgatggccgccgggtgcgcgtgacgggcagtctgccgccggcctgcgacgggcagcgcgcctacgtcaacgtgctggaccacgacgcgttcgccggccaggacttctcggcgctgtggcaggcgctgggcggcagcgggccgctgcgggtggcgcgcggccgcgcgccggacgacgcgcgcgagctggcgtcctggcagtcgcagcccttggcggtggcgctgtccgacatcaacaagtacagcaacaacaccatggcgcgcacgctgttcctgacgctgggccgcgcggccggcggcgaggataccgccgccgcggccgagcgggcgctgcgcgaggagctgagcctgcgcggcatcgccgacgccggcgcgctgcggctggagaacggctccggactgtcgcggcgcgagcgggtgacggcccggctgctgggcgaggtgctgctggacgccgcgcgcgggccgtacgccggcgagttcatcgccagcctgccgatcgccgccaccgacggcacgctgaagaagcgcttcgtagagctggggccgcggctgcggatgaagaccggcacgctgaacgacgtcaaggcgctggccggctactggcaggcggccgacggcaggcggctggccatcgtcgccatcgtcaacggcccgcgggcgatggagtcgggcaaggcgctggacgcggtggtggccgacctggcgctcgccttcaacaccgacacgatgcgatccagcgcaaagcgctga

SEQ ID NO: 652 - protein, 463 aa, Chromobacterium violaceum ATCC 12472
MAIAKWPVLLALACAPALALDLHGLKPDEIAVWAAPVEGDAPAITHRADAPVNPASTMKLLTGWAALNRLGPDYRWKTALLSAAPVEGGALKGDLYWLGGGDPRFDNGDLLSLLYSLRLRGIRQLDGRLLLDKRAFGNVGGADDFDGDAGRAFVVGPDAHLTNLKVAWLTFFNDGQGARVALDPPLAGVELRAALTPGPDQPCADVRRFVSIDNDGRRVRVTGSLPPACDGQRAYVNVLDHDAFAGQDFSALWQALGGSGPLRVARGRAPDDARELASWQSQPLAVALSDINKYSNNTMARTLFLTLGRAAGGEDTAAAAERALREELSLRGIADAGALRLENGSGLSRRERVTARLLGEVLLDAARGPYAGEFIASLPIAATDGTLKKRFVELGPRLRMKTGTLNDVKALAGYWQAADGRRLAIVAIVNGPRAMESGKALDAVVADLALAFNTDTMRSSAKR

SEQ ID NO: 653 - DNA, 1527 bp, Photorhabdus luminescens subsp. laumondii TTO1
  CDS (1)..(1527): transl_table=11
ttggtgatgggtcatcgtttacttttccccactttgcgccttagtattgtggtatgtctacatccatatgcgaaatttatgtccttctttaaaattgccggcagattaatttgcgttaccgctctgtatttaactatacccaacgcaaacgccacacctgttgaggaatatacgcaatatctgcctgatggtactaatctggcgttaatcgctcaaaaagcgggcagcagtaccccgttaattgattatcacgggcagcaaatggctctaccagccagtacgctgaaagttgtcacagctcttgcagcattgttacaactgggtaaagattatcgctttatcaccacactggaaagtcacggaaaaatttcaaacggcatcctgagagggaatttgattgctcgttttgtcggagatccgacactgacccgtcaacaacttcgcaatatggtcacagttctgaaacaatctggcgtggaaaaaattgacggtgatcttttgatagatgtttccgcctttgccagccacgataaagctcccggttgggtatggaatgacatgacccaatgtttcagcgctccccctgctgctgcaattgtagatcgaaattgtttttcagtttcgctatatagtgctgaacaccccggtgatactgcatttatccgcgtagcatccttttatcccgtaaatatgttcagcgaagttaaaacgttggcaaaaggctctcctgaaagccagtactgcgaactggacgtcgttcccggagagctgaaccgttttactcttaccggatgccttactcaacgcagtgaaccgttgccactggctttcgcgattcaaaatggtaccagctatgcgggtgcaattctcaaaaatgaattgcaaattgcaggaattgaaatcacaggtaatcttaaacgccaaagtttaccaactgaaccgggaaaagttctggctcaaaatcaatcagcaccattacatgatctgctaaaagtcatgctaaaaaaatctgacaatatgattgctgataccgtatttcggacaataggccgacaacactttgatataccaggaacctggcgttcaggttctgatgcggtaaggcaagtattaaaacaaaaagcaggtatcgatctaggaaataccgtgatggtagatggctcaggattatcccgccataatctaattactccagcaaccatgatggaagtattacagtttattgctcagcatgatcaagaattagattttatttccatgctgccattagcgggtcatgatggcacattaagataccggggagggctggatgaagcaggagtaaacggaaaagtttcggctaaaaccggtgccctgcaaggagtttataacctagctggctttataaccactgctagcggtcaacaagttgctttcgtgcaatttatttctgcttacgccgtaccgccaaaagagcatcgcaaccgtcgggcccctttgattcgattcgaaagcaggctatacaaagatttataccaacacaactga

SEQ ID NO: 654 - protein, 508 aa, Photorhabdus luminescens subsp. laumondii TTO1
MVMGHRLLFPTLRLSIVVCLHPYAKFMSFFKIAGRLICVTALYLTIPNANATPVEEYTQYLPDGTNLALIAQKAGSSTPLIDYHGQQMALPASTLKVVTALAALLQLGKDYRFITTLESHGKISNGILRGNLIARFVGDPTLTRQQLRNMVTVLKQSGVEKIDGDLLIDVSAFASHDKAPGWVWNDMTQCFSAPPAAAIVDRNCFSVSLYSAEHPGDTAFIRVASFYPVNMFSEVKTLAKGSPESQYCELDVVPGELNRFTLTGCLTQRSEPLPLAFAIQNGTSYAGAILKNELQIAGIEITGNLKRQSLPTEPGKVLAQNQSAPLHDLLKVMLKKSDNMIADTVFRTIGRQHFDIPGTWRSGSDAVRQVLKQKAGIDLGNTVMVDGSGLSRHNLITPATMMEVLQFIAQHDQELDFISMLPLAGHDGTLRYRGGLDEAGVNGKVSAKTGALQGVYNLAGFITTASGQQVAFVQFISAYAVPPKEHRNRRAPLIRFESRLYKDLYQHN

SEQ ID NO: 655 - DNA, 1431 bp, Vibrio vulnificus YJ016
  CDS (1)..(1431): transl_table=11
atgcgttttctcgcttcacttttcacatcgagcttttgcttcttgcttgctacttcttccaccattcaggcagaagaatactcaccgctaagcaacctcccagatggcagtagaagcagtatttgggtagaagacttacaaaaccaaacctcttggcaaaccttagcgcaaaatacccgctttttccctccagcaagcacactcaaactggccaccgccctagcggccaaactggaacttgaagacgactttgccttcagcaccgaactgttaagcaatggccgtgacatcagcattcgtttctctggcgatcccacgctaaaaaccgcacatttaaaacagcttttagaagcctacaagcagcagaatggcgcgaacattcgtggagacatttggctcgataactcggtgtttacaggctatgagcgcgctgtaggttggccttgggatattttgggcgtttgctacagcgccccttcaagtgccatcacattagatgagaactgcgctcaagcctctatttacacattggccgatggcaatactcgagtttacgtgccagagcagtacccgattcacgtcacaaccaatgcgaaaaccgtctctaaagcgatccagcagagtaatcattgcgacttagagctgttgacgggggataacaaccaatatcaattgcaaggctgtctggttgagagagacaaaccgttgccccttaagttcgcgattcaagactcaactcaatacacgagtcgaaccttatataccttgttgagacagctcaaaattgaacttggtggagaaattaaaattggtgtcatgccaaataaagccaatgtcattgccagccactcttcagctaccttgccagagttattagacactatgctaaaggactctgataatcttattgccgacaaccttactaaagcgattggggctcgcttttacttgcaacccggtagctttgccaatggcactgaagcggtgaaacagatcctttattccaaagcgggaatcgatctttctcgcgctcaactcgccgacggttcgggcttgtcgcgtaataatcggatcaatcctatggatatgatgtcgatcttgaaatacatctggcaacacgacaaagagctcggcttagtggcattgatgcccaaatccggagagtccggcaccctcaagtaccgccaaagcatgcgcagtgatccagttaaagggcagatcgtcgctaaaagcggctcactttatggcagctataacatggcaggatttgttttagatcagaatggacagccaagcgccgccttcattcaatttattaccgattactatcctgataaaagtgaagagagtggcaatgttgcacctatcacacgcttcgagcgtgagttttatcgagacttagttgagtttacacaagtaaaacacaactaa

SEQ ID NO: 656 - protein, 476 aa, Vibrio vulnificus YJ016
MRFLASLFTSSFCFLLATSSTIQAEEYSPLSNLPDGSRSSIWVEDLQNQTSWQTLAQNTRFFPPASTLKLATALAAKLELEDDFAFSTELLSNGRDISIRFSGDPTLKTAHLKQLLEAYKQQNGANIRGDIWLDNSVFTGYERAVGWPWDILGVCYSAPSSAITLDENCAQASIYTLADGNTRVYVPEQYPIHVTTNAKTVSKAIQQSNHCDLELLTGDNNQYQLQGCLVERDKPLPLKFAIQDSTQYTSRTLYTLLRQLKIELGGEIKIGVMPNKANVIASHSSATLPELLDTMLKDSDNLIADNLTKAIGARFYLQPGSFANGTEAVKQILYSKAGIDLSRAQLADGSGLSRNNRINPMDMMSILKYIWQHDKELGLVALMPKSGESGTLKYRQSMRSDPVKGQIVAKSGSLYGSYNMAGFVLDQNGQPSAAFIQFITDYYPDKSEESGNVAPITRFEREFYRDLVEFTQVKHN

SEQ ID NO: 657 - DNA, 1434 bp, Erwinia carotovora subsp. atroseptica SCRI1043
  CDS (1)..(1434): transl_table=11
atgcgtttttcatcgattgttaccggacttgcctgcgcttttgttctgcatgccaatgcagcttctgttgaagatcatcgtcaatatttgcctgatggcgccaatttggcgttattggtacaaaaagttggcgcaacaacacccagcatggccttcaatagccagcaaatggcgcttcctgccagtacgcaaaaggtgataaccgcattagctgcattactgcaattgggtccggattatcgattcatcactacgatggaaagtcatggcccagttaccggcagcctgctaaacggcaacctgatcgtacggtttagcggtgacccgaccctgaagcgccaacaaatacggaatatggtgcaggaattaaggaaacgaggaatacgggaaatcgcaggcgatgtgctaatcgatacctccgtttttgccagtcacgacaaagcaccaggctggccttggaacgacatgacacagtgtttcagtgccccgccgggcgctgcaattgtcgatcgtaactgcttttccgtctcactctacagcgcgcctaaagcgggtgataacgcctttatccgcgttgcatcctattatccggtacagatgttcagcgaggtgcgcacgctggctaaaggatctaccgatgcccagtactgcgaactggacgtggtccccggagaattgaatcgctttacgctcactggctgcctaacccagcgaacagaaccacttccgttggcgttcgcgattcaggatggggctagctatgctggcgctatcgttaaagatgaacttcagcaggcggatatccgcattaaaggtagtttgcgccgccagacgcagccggggccagccgggactgtgctaacccagacacaatcgcctccgctacacgacctgctcactatcatgctgaaaaaatcggacaacatgattgccgatacggtttttcgtaccattgggcatgagcgctttagcgtgccaggcacatggcgtgcaggtgccgatgctgtgcgtcagatcctgaggcagaaggcgggtgtagatttaggaaacagtattgttgtggatggttcaggtctgtcacggcacaacctgatttcaccggaaacgatgatgcaggtattacagtacatcgcgcagcatgataatgagctgaattacatcacgatgctcccactttccggctatgacggcacgctacgctatcgtggcggcctgcatgaagctggcgttgacggcaaagtttcggctaaaactggggcgttacagggcgtatacaatctggcggggttcattaccaccgcgagcggccagcgtatggcatttgtccagttcctgtctggctatgccgtaccgccagaagaccagcgcgcacgtcgcgtccctctggtgagatttgaaagccgtctctacaaagacatttatcagagcaactaa

SEQ ID NO: 658 - protein, 477 aa, Erwinia carotovora subsp. atroseptica SCRI1043
MRFSSIVTGLACAFVLHANAASVEDHRQYLPDGANLALLVQKVGATTPSMAFNSQQMALPASTQKVITALAALLQLGPDYRFITTMESHGPVTGSLLNGNLIVRFSGDPTLKRQQIRNMVQELRKRGIREIAGDVLIDTSVFASHDKAPGWPWNDMTQCFSAPPGAAIVDRNCFSVSLYSAPKAGDNAFIRVASYYPVQMFSEVRTLAKGSTDAQYCELDVVPGELNRFTLTGCLTQRTEPLPLAFAIQDGASYAGAIVKDELQQADIRIKGSLRRQTQPGPAGTVLTQTQSPPLHDLLTIMLKKSDNMIADTVFRTIGHERFSVPGTWRAGADAVRQILRQKAGVDLGNSIVVDGSGLSRHNLISPETMMQVLQYIAQHDNELNYITMLPLSGYDGTLRYRGGLHEAGVDGKVSAKTGALQGVYNLAGFITTASGQRMAFVQFLSGYAVPPEDQRARRVPLVRFESRLYKDIYQSN

SEQ ID NO: 659 - DNA, 1449 bp, Yersinia pseudotuberculosis IP 32953
  CDS (1)..(1449): transl_table=11
atgcatttttcacgaattgtcagtggattggcctgttctatcatactcaatatcagtgtatctaatgccaatgcggctcaggtcgagaattacactcagtatctgcctgatggggcaaatcttgcgttaatggtccaaaaaattggggcatcaacccctgcaatagactatcacgctcagcagatggcgctaccggccagtacgcaaaaagtactgacggccttggcagcgttattgcaactcggcccagactttcgcttcaatactaccttggaaagccatggcacgattactgatggtgtgttgcgaggtaatttaattgcccggtttggtggtgacccaacgttaacgcgtcaacaactgcgtaatatggttgcgactctcagaaaagcgggggttaaacagatcgcgggggatgtggtgattgatacctcagtattcgccagtcatgacaaagcaccgggttggccatggaacgatatgacgcaatgctttagtgcgccgcctgctgctgccattgttgatcgcaactgtttttcagtctctctttacagtgcgcccaatcccggcgataccgcatttatccgtgtcgcgtcttattatccggtgcaaatgttcagtgaagtccgcacgttagccaaaggctcacccgatgcacaatattgtgagttggacgtcgtgccaggcgaattaaaccggtttacgcttaccggttgtctgacacagcgcagcgaacctttgccattggcctttgctgtgcaaaatggggccagctacgccggggctatcttaaaagatgaattgaaaaaagctgatattcaaattgatggcaatctgcgccgccaaacaataccgagtccagcgggaaacgtgctagcacagacccaatcagcccccttacatgatttgctgaaaatcatgctgaaaaaatcagacaatatgatcgctgacaccgtcttcagaaccattggtcatcagcgttttggggttccgggtacttggcgctcgggtgccgatgccgttcgccaaattttacgccaaaaagcaggcgttgatcttggtaacagcattgtggtggatggatctggcctatcgcgccataatcttatttcaccagcaacaatgatgcaggttttgcaatatattgctcaaaatgatcaagagcttaattttatatcaatgctgcctctagcaggatatgacggtactctacgttatcgtggtggcctgcatgaagcgggggtcaacggtaaagtttcagcgaagacgggtgcactgcaaggggtttacaatcttgccggtttcattactaccgctagtgggcaacgtatggcatttgtacaatttttatccggctatgccgttccacctgaagaccaaaaaaatcgccgagcccccttggttcgatttgagagccgcctctataaagatatttatcagaataactga

SEQ ID NO: 660 - protein, 482 aa, Yersinia pseudotuberculosis IP 32953
MHFSRIVSGLACSIILNISVSNANAAQVENYTQYLPDGANLALMVQKIGASTPAIDYHAQQMALPASTQKVLTALAALLQLGPDFRFNTTLESHGTITDGVLRGNLIARFGGDPTLTRQQLRNMVATLRKAGVKQIAGDVVIDTSVFASHDKAPGWPWNDMTQCFSAPPAAAIVDRNCFSVSLYSAPNPGDTAFIRVASYYPVQMFSEVRTLAKGSPDAQYCELDVVPGELNRFTLTGCLTQRSEPLPLAFAVQNGASYAGAILKDELKKADIQIDGNLRRQTIPSPAGNVLAQTQSAPLHDLLKIMLKKSDNMIADTVFRTIGHQRFGVPGTWRSGADAVRQILRQKAGVDLGNSIVVDGSGLSRHNLISPATMMQVLQYIAQNDQELNFISMLPLAGYDGTLRYRGGLHEAGVNGKVSAKTGALQGVYNLAGFITTASGQRMAFVQFLSGYAVPPEDQKNRRAPLVRFESRLYKDIYQNN

SEQ ID NO: 661 - DNA, 1428 bp, Mannheimia succiniciproducens MBEL55E
  CDS (1)..(1428): transl_table=11
atgtcaaaatttactaaaaatctatttgcttcaagcttattattttctaatattgcattcgctcaaatagatgttcaaccattaacacaaatacttccgcaaggggcaagcatcggttttatcgccgaaaatatcaaccaaaataaaattattgcggatcataacgggcaaacctttatgcttcccgccagtacgcaaaaagtctttaccgcacttgccgccaaattagcgctcggcgatgagttccgctttgaaaccagcttgcaaacacaaggcaaggtgcaaaataatcagttagacggcgatctgattgttaaatttaccggcgatccggatttaacgaccggtcaattatacggcttattcgccaccttaaaaaaacagggcgttaaccaaattaacggtaatttaattttggatacctctgtttttgcaagccacgaccggggttccggctggatttggaacgatttgactatgtgctttaattcgccgccggctgcggttaatttagataacaactgtttttatgtaaatttagacgccaataaatcggtgggtgaattcgtgcaattcaatgtaccgactcaataccctattcaggttttcggacaagttcgtgttgtcggtgcggaagaagcaccttattgtcaattagatgcggtagttcatgataataaccgttatcagattaaaggctgtatcgcccgccaaaccaaacctttcgggttaagttttgcagtgcaggataccgatgcttatgcggcggcaatcgtccaacgtcaattaagacaagcgggtattcaatttagcggacaagtgcaacaacctcatcaacctcaacaaggcacggtattagcacaacatttatcaaaacctctgcctgaactcatcaaaaaaatgatgaaaaaatccgataatcaaatcgccgattcgttgttccgtaccattgcctatcatacgtttaaacgacccgcatcctttcaactaggttcattggcgttaaaacgtattctttccacgcaggcaaagataaaattcgggcacagcatcatcgccgatgggtcagggctttcccgccataatctggttgatccgaatacaatgttgcaagctttgaattatattgcccgtaacgaagacaagttacatttaatggattcctttcccgttgccggtgttgacggtactatcagcggtcgaggatcattaattaatccgccactgataaaaaacgtattggcaaaaaccggatcgttaaagggcgtatataatttagccggatttatgaccaatgcccgcggcgaacgtattgcctttgtacaattcattaacggttattccaccggtgagttggaaaataaaacaaaacgtgcgccgttagtccaatttgaaagcaaattatataatgcgctttatgccgattaa

SEQ ID NO: 662 - protein, 475 aa, Mannheimia succiniciproducens MBEL55E
MSKFTKNLFASSLLFSNIAFAQIDVQPLTQILPQGASIGFIAENINQNKIIADHNGQTFMLPASTQKVFTALAAKLALGDEFRFETSLQTQGKVQNNQLDGDLIVKFTGDPDLTTGQLYGLFATLKKQGVNQINGNLILDTSVFASHDRGSGWIWNDLTMCFNSPPAAVNLDNNCFYVNLDANKSVGEFVQFNVPTQYPIQVFGQVRVVGAEEAPYCQLDAVVHDNNRYQIKGCIARQTKPFGLSFAVQDTDAYAAAIVQRQLRQAGIQFSGQVQQPHQPQQGTVLAQHLSKPLPELIKKMMKKSDNQIADSLFRTIAYHTFKRPASFQLGSLALKRILSTQAKIKFGHSIIADGSGLSRHNLVDPNTMLQALNYIARNEDKLHLMDSFPVAGVDGTISGRGSLINPPLIKNVLAKTGSLKGVYNLAGFMTNARGERIAFVQFINGYSTGELENKTKRAPLVQFESKLYNALYAD

SEQ ID NO: 663 - DNA, 1794 bp, Legionella pneumophila subsp. pneumophila str. Philadelphia 1
  CDS (1)..(1794): transl_table=11
atgaaaaggacgttgactggggcattcatgtgggcagtatggtcactgtcatctcatgcggctagtatgcagttcgaggtggataaattaattaatcggctaaaccctcatgtgaacctggggatagtagtgaccgatctaacctcgggcgagacgctatataaacgcaatgccaatcgtttgtatattcctgccagcaacatgaagcttttttccgaggcagcggctctgatggctttgggtccagactaccaattcaagaatcaactcagtacgagcgccaatcaattacaacaaggtgttttgcacggaaacttgtatttacatctcagcggcgatccttcgtttagcagagaagatttaaagacgttgctttcttcactcaaggattggaatatcacaaccattcaaggtaatgtgatcattgacagtagcctgatgtccattcctgcctatcccccaggctggctaacttcggatttatcttatagttatggtgcgccaatagcacctttgatggttgattccaaccgattaacaatcacggtcaaccccggggctaaagcaggcgctcctgctattgttgaagtagatgatggcggcggtaccattaacctgaataatcaagcgaccacgaaggcgagtgagaaaggatgtggtgtagggttttatttggatcctgagaacaatttaacggtaagaggctgtgttggattagggcaatgggctgttcagcaacgcatcgctataaagaatccttttgtttatgcccaggggatgattgtgagtgagcttgccaagtctaacattaaattaaatgggcaggttttgcttggaagagctcctgctggtactttattaattgccactcgctattcaaagccaatttcccaactgatggcagatactttaaagccttctgataatttatatgctgatagtttatacttgcatgctgctgccaaaattaagggtagtcctgtggattggaagcaagcacagccagtaattaaaaactttttgcagcaacaaacaggaatcgatttaaaagactcgaattttacagatggttctggattatcacgttataatttggtaactccagcgcaaaccatggcgcttttaaagttcttgtatcaacgtttcccattatcatacgaatacattgctgctttacccatctctggtcgggatggtactttgcaaaaacggtttaaaaccccaaatcaacaaggatttgtgcgagccaaaaccgggacgatgacggggatgaacagtttatccggttacttgtatactgctaatggccatactttggcttttgctatgtatatcaatagattaccaggaaaaccagctgggccaggacgtccattattagacgcattatgcacttatttcttgcagcaaagcccaacaagcagtcgactggcacgggtattatctccccacagtcgcattaagttccaatttaatcctacacaaattgagttacagcgagttcatcaagccaaatggaggcgtttggaaacggcagtgaggcaggtcttgagaggacaggatgtgaatgtggtttaccggggcaatgaattaatcgtgacagacaatcagtctaatgcgaatagcgtttggaaagctttacaatcaattggcaagaaatattcattcgccgtagctttgtcttctaaagtgatgcctgttacaccatcgggaaaacctttgcttctttgggtgcaagcacctttatctgaaaataaggcagagagaacctggataattcgggaagcggtataa

SEQ ID NO: 664 - protein, 597 aa, Legionella pneumophila subsp. pneumophila str. Philadelphia 1
MKRTLTGAFMWAVWSLSSHAASMQFEVDKLINRLNPHVNLGIVVTDLTSGETLYKRNANRLYIPASNMKLFSEAAALMALGPDYQFKNQLSTSANQLQQGVLHGNLYLHLSGDPSFSREDLKTLLSSLKDWNITTIQGNVIIDSSLMSIPAYPPGWLTSDLSYSYGAPIAPLMVDSNRLTITVNPGAKAGAPAIVEVDDGGGTINLNNQATTKASEKGCGVGFYLDPENNLTVRGCVGLGQWAVQQRIAIKNPFVYAQGMIVSELAKSNIKLNGQVLLGRAPAGTLLIATRYSKPISQLMADTLKPSDNLYADSLYLHAAAKIKGSPVDWKQAQPVIKNFLQQQTGIDLKDSNFTDGSGLSRYNLVTPAQTMALLKFLYQRFPLSYEYIAALPISGRDGTLQKRFKTPNQQGFVRAKTGTMTGMNSLSGYLYTANGHTLAFAMYINRLPGKPAGPGRPLLDALCTYFLQQSPTSSRLARVLSPHSRIKFQFNPTQIELQRVHQAKWRRLETAVRQVLRGQDVNVVYRGNELIVTDNQSNANSVWKALQSIGKKYSFAVALSSKVMPVTPSGKPLLLWVQAPLSENKAERTWIIREAV

SEQ ID NO: 665 - DNA, 1449 bp, Azoarcus sp. EbN1
  CDS (1)..(1449): transl_table=11
atgatgacaaaagcattgctccgcgtgctcggcgcgctgttcctcggcggctggctcgccaccgcccacccttcccacccttcccacccttccgcgctgccggagccggtcgcgcaggccctcgctgccgcgcacattccgcaatcggccgtcgcgctgtgggtgcaggccgtcgacagcggcgagccgcaactgcgagtgaacgccgagcggccgatgaatccggcgtccgtgatgaagctcgtcaccgcgttcgccgcgctcgagcgcttcggcccggcgcacgtgtggacgactcgcgtcgcggcgaccgggaccatccgcgccggcgtgctcgaaggcgacctttacctgatcggcggcgcggacccggtgctgagcgtcgagcggctgtggacgctgctgcgaaagatccgcgcgctcggcatcgagacgatccgcggcgatctggtgctcgacggctcggcgctgcggctgccgcagcacgacccggcggcgttcgatgatcgcgcgctccgcccctacaacagtggcgcccacggtctgctggtgaatttcaacacgctgcagctgacgctgctgccggcgggcaggccgggcgagcgggttacggtcgcagccagtccgccgctgaaaggactcgaactcgacaaccgcatcgtcatcgcagcgggcgagtgcggcgtgtggcaccgcgacctcgacgcggcgctcgaagccgcgccgggcggtccacggctggtgctgctcggtagcctgccggcgagttgcggccagcgcgactgggcgacagcgccactgccgccggaacgcttcggcgtcgccgccgtcgccgcgctgtgggcggaactcggcggcaaggtcgaaggcatcgcgcggccgggcacggcgcccgtcgaggccgcattgctgctgaccggtagctccccgccgctcgcggacgtcgtgcgcgagatgaacaaatggtcgagcaacgtgatcgcgcgcgagctgctcgcgaccctcggcgcgaccgacgcggcgtcccccgacatggtcgccggtggcgccgcgctcacgcgggcgctactcgacgcggcgggcatcagcacggccgggctgctcgtcgagaacggctccggcctgtcgcgcagcgaaagcgtcagcgcccgcaccctcggtgaaatgctgctcgccgcatggcgacggccgtacatgccggaattcgtcgccgcgctgccggtcgccggcctcgacggcactgcgcgcggccggctccacgacagcccggcgcgcggccacgcgcatatcaagaccggctcgatcaacggcgtgcgcgcgatggccggctacgtgctggatcgcaacggccgccgccatgtcgtcgcgatgctcgtcaacgatgcggcggcaggcagcagccaggcggcgcaggacgcgctgctcgaatgggtgtgggacgcgcgctga

SEQ ID NO: 666 - protein, 482 aa, Azoarcus sp. EbN1
MMTKALLRVLGALFLGGWLATAHPSHPSHPSALPEPVAQALAAAHIPQSAVALWVQAVDSGEPQLRVNAERPMNPASVMKLVTAFAALERFGPAHVWTTRVAATGTIRAGVLEGDLYLIGGADPVLSVERLWTLLRKIRALGIETIRGDLVLDGSALRLPQHDPAAFDDRALRPYNSGAHGLLVNFNTLQLTLLPAGRPGERVTVAASPPLKGLELDNRIVIAAGECGVWHRDLDAALEAAPGGPRLVLLGSLPASCGQRDWATAPLPPERFGVAAVAALWAELGGKVEGIARPGTAPVEAALLLTGSSPPLADVVREMNKWSSNVIARELLATLGATDAASPDMVAGGAALTRALLDAAGISTAGLLVENGSGLSRSESVSARTLGEMLLAAWRRPYMPEFVAALPVAGLDGTARGRLHDSPARGHAHIKTGSINGVRAMAGYVLDRNGRRHVVAMLVNDAAAGSSQAAQDALLEWVWDAR

SEQ ID NO: 667 - DNA, 1470 bp, Bacillus clausii KSM-K16
  CDS (1)..(1470): transl_table=11
gtgaaaaagaatgggcgtttagcattgttggcgattgtggtagtcttgcttgtatttcctcttacaacctcattccaggcaaaagaaaaaacgccacattttgcagatgaaattgctgcgctattggaacatgaacgtttggctggcgcatctgttgccgtgagtgtccgggacggcgctaccaatgaactgttgtttgaacacaatgggaacatgctgctccatccagcctcttcgatgaaagtgttaactgccgttgctgctttaacggagctaggctctgaccatacgttcaaaacgaccgtgtttacagacggcaaaataagcaaacgcgtcctccatggaaatgtatacataaaagggggtggcgaccctacactcatggaagcagaattaaatgagcttgcacaggaggtgcgcaacaaaggcatcaaaaaaataaatggcgatataattgccgatgaatcacgctatgacgacgtacggttatcccaagatttgaattggtcggatgaatcgttttatacaggggcgcaagtgtcagcattgactctttctccgacagacgactatgatgcaggaaccatcttggttgaagtgaccccgggaaaaaaagcaggccaaaaaccaattgtcacgacgcagcctgacgttaaagcagtgccgattataaatgaggcagtgacagtagcagctgaagaacagaaatcattaaaaatagaaagagaacatggcaaagcggacatccgcatcaccggcaatgtgcccattggggcaagcgcaacaagaagttgggtagctgtatgggagccggctcaatatacaactgctgtatttaagcaggctcttaacaatgcggggattgacataaaaaaggcggacgagacaatagggtacgtgcctaaaaaagcagtgaaacaagctgaacgagagtcgatgcctttgcatgaactgcttgtaccgtttttaaagcttagcaacaatggacatggagaagtgcttgtaaaagaaattggttatgtaaaagaaggagaagggagctgggatgcgggattgcctcttgtcgcagaaagcaccgagcagcttggggcaagcggtcctttattactgcgtgatggctcgggcatgtcccataagacgctcgttgcagcaaatgatttaacgagcgtgctctatcacgctcagcagcagcattggtttactgatttttacaatggtctaccagtggctggagaaaaagaacggcttgttggcggaacgttgcggaatcgtttaggcgggatagaaggggaagtgagagcgaaaacgggctcccttacaggggtatcaagcttaactggctatgcaaggacaaatgacggcgatagctatttgtttacgattatggtgaataatttcattggcgaaagccaaacgattcgacacattgaagatgagatcgtgttggcgattcttggcgaatcatcctaa

SEQ ID NO: 668 - protein, 489 aa, Bacillus clausii KSM-K16
MKKNGRLALLAIVVVLLVFPLTTSFQAKEKTPHFADEIAALLEHERLAGASVAVSVRDGATNELLFEHNGNMLLHPASSMKVLTAVAALTELGSDHTFKTTVFTDGKISKRVLHGNVYIKGGGDPTLMEAELNELAQEVRNKGIKKINGDIIADESRYDDVRLSQDLNWSDESFYTGAQVSALTLSPTDDYDAGTILVEVTPGKKAGQKPIVTTQPDVKAVPIINEAVTVAAEEQKSLKIEREHGKADIRITGNVPIGASATRSWVAVWEPAQYTTAVFKQALNNAGIDIKKADETIGYVPKKAVKQAERESMPLHELLVPFLKLSNNGHGEVLVKEIGYVKEGEGSWDAGLPLVAESTEQLGASGPLLLRDGSGMSHKTLVAANDLTSVLYHAQQQHWFTDFYNGLPVAGEKERLVGGTLRNRLGGIEGEVRAKTGSLTGVSSLTGYARTNDGDSYLFTIMVNNFIGESQTIRHIEDEIVLAILGESS

SEQ ID NO: 669 - DNA, 1467 bp, Pseudomonas syringae pv. syringae B728a
  CDS (1)..(1467): transl_table=11
atgatcaagtcgctacgtccattgttgctcgcgtcactccttttgcccctggccctaccctcctacgctgccgtcatcaacaccacgctgccccccaaggttcaacaggccctgaaagccagcaaactcggcgatgacgcactctcgctggtgatgctgccgctcaacggcccaggtacaccgaccgtgttcaacgccgacgtatcggtcaatccggcgtctaccatgaagctgattaccacctacgcggcccttgaaatgctcggcccgacccaccagtggaaaaccgaattcttcaccgacggcaccctgagcaacggcgtgctgcgcggcaacctgtacctcaagggcggcggcgatcccaagctgaatatggaaaagctctggctgctgatgcgtgacctgcgcgccaatggtgtacagcaggtgaccggcgatctggttctcgaccgcagtcattttgtgcaaccgcaattgccggtgttcaacgatgacggcaatgacgacaacaagccgtttctggtcaagcccgacgcgctgatggtcaacctcaaggcgctacgcttcgtgacccgcaatgatgacggcaggattctggtctcggtcgagccgccgattgccagcattcgcattgataatcaggtcaaggcaagcgcctcgaaacaatgcaccggggatgtgcgctacaacccggtcacccaggcggatggcagcgtcaacgtgacggtcaccggccagttgggcaatggctgcaactcacagacctacctgtcactgctggaccaccctacctatgcggccggcgcagtgcgagccatctggcaggaactgggcggtaccattcaaggcaaggatcgcgttggcgtgctgcccggcaatgccaagctgttggccaaggccttttctccggacctggtggaagtcattcgtgacatcaacaaattcagcaacaacaccatggctcagcaactgttcctgagcctgggcgaagagttccgcaacgaagctgacggtgacgacggcaaggccgcccagcgtgtcatccgtcagtggctggcgaagaaaggcatcaccgcgccgcatctggtcatggagaatggctccgggctgtcgcgggccgagcgtgtcagcgcgcgcgagatggcggtgatcctgcaagcggcctggcgcagcccctatgctgcggaattcatgagctcgatgccgctggccggtctcgacggaaccatgcgcaagcgactcaagcgcactccgctgctcggcgaggcgcacatcaagaccggcaccctgaataccgtgcgcgcgattgccggcttcagccgcgacagcaacggcaacacctgggccgtcgtggcgatcctcaacgacccgcgtccgttcggcgcatcctcgatactcgacgaagtactggtcgatctgtaccggcagcccaagctgaccaacaccaccgtctcgatccagcaataa

SEQ ID NO: 670 - protein, 488 aa, Pseudomonas syringae pv. syringae B728a
MIKSLRPLLLASLLLPLALPSYAAVINTTLPPKVQQALKASKLGDDALSLVMLPLNGPGTPTVFNADVSVNPASTMKLITTYAALEMLGPTHQWKTEFFTDGTLSNGVLRGNLYLKGGGDPKLNMEKLWLLMRDLRANGVQQVTGDLVLDRSHFVQPQLPVFNDDGNDDNKPFLVKPDALMVNLKALRFVTRNDDGRILVSVEPPIASIRIDNQVKASASKQCTGDVRYNPVTQADGSVNVTVTGQLGNGCNSQTYLSLLDHPTYAAGAVRAIWQELGGTIQGKDRVGVLPGNAKLLAKAFSPDLVEVIRDINKFSNNTMAQQLFLSLGEEFRNEADGDDGKAAQRVIRQWLAKKGITAPHLVMENGSGLSRAERVSAREMAVILQAAWRSPYAAEFMSSMPLAGLDGTMRKRLKRTPLLGEAHIKTGTLNTVRAIAGFSRDSNGNTWAVVAILNDPRPFGASSILDEVLVDLYRQPKLTNTTVSIQQ

SEQ ID NO: 671 - DNA, 1440 bp, Haemophilus influenzae 86-028NP
  CDS (1)..(1440): transl_table=11
atgaaaaaattatcttcaatttccaccgcacttggttcctttttactttcagtgagttttagcctaccaactttcgccaatattaatgtttcagatttaacacaaaaattgcctgaaggctctaacgcaggtgttattgctaaaaatatcaatcaaaatcaaataattgctgattataatggctcaacctttatgctgcctgcgagtacacaaaaagtttttacagccgttgccgctaaacttgcattaggcgatcaattccaatttgagaccgcacttttgagtaatgggaaaattcaaaatgggaatttagatggcaacttaatcgtgagtttcacaggcgatcctgatctcacaagaggtcagctttatagcttacttgcagaattaaaaaaacaaggcatcaaaaaaattaatggcgatttagtattagatacctctgttttttctagtcacgaccgaggattaggttggatttggaacgatctcacaatgtgtttcaactctccaccagcagctgcgaatattgataacaactgtttttatgcggaactagatgcgaataaaaatccaggtgaaatagtaaaaattaatgtgcctgcacaatttccaattcaagtgttcggacaagtttatgtagcggatagcaatgaagcgccttattgtcagctcgatgttgttgtacacgacaataatcgctatcaagtaaaaggatgtttagcccgtcaatataaaccttttggcttaagttttgccgtgcaaaatacggatgcttatgctgccgcgattattcaacgtcaattaagaaaattaggtattgagttcaatggcaaagtcttgttaccccaaaaaccacaacaaggtcagctattagcgaaacatttatcaaaaccattacctgatttattgaaaaaaatgatgaaaaaatcggataaccaaattgccgattcattattccgagcggtggcattcaattactataaacgccccgcctcctttcaattaggcacattagcggttaaatccatattgcaaaaacaaggaattcgttttggtaatagcattttagccgatggttcgggtctatctcgccataatcttgtggcacctaaaacgatgctatccgttttagaatacatcgccaaaaacgaagataaattacatttaatggaaacttttcccatcgcaggtgtagatggcacgatcagtgggcgaggtggattaattagcccaccattagtgaaaaacgtgattgctaaaactggttctttgaaaggcgtttataacctagctggctttatgacaaatgcgcgaggggaaaaagtggcatttgtacaatttattaatggctactcaacgggcgatttagaaagcaaaacaaaacgtgccccattagtacaattcgagcgtaatttatataacgaactctataaatattaa

SEQ ID NO: 672 - protein, 479 aa, Haemophilus influenzae 86-028NP
MKKLSSISTALGSFLLSVSFSLPTFANINVSDLTQKLPEGSNAGVIAKNINQNQIIADYNGSTFMLPASTQKVFTAVAAKLALGDQFQFETALLSNGKIQNGNLDGNLIVSFTGDPDLTRGQLYSLLAELKKQGIKKINGDLVLDTSVFSSHDRGLGWIWNDLTMCFNSPPAAANIDNNCFYAELDANKNPGEIVKINVPAQFPIQVFGQVYVADSNEAPYCQLDVVVHDNNRYQVKGCLARQYKPFGLSFAVQNTDAYAAAIIQRQLRKLGIEFNGKVLLPQKPQQGQLLAKHLSKPLPDLLKKMMKKSDNQIADSLFRAVAFNYYKRPASFQLGTLAVKSILQKQGIRFGNSILADGSGLSRHNLVAPKTMLSVLEYIAKNEDKLHLMETFPIAGVDGTISGRGGLISPPLVKNVIAKTGSLKGVYNLAGFMTNARGEKVAFVQFINGYSTGDLESKTKRAPLVQFERNLYNELYKY

SEQ ID NO: 673 - DNA, 1461 bp, Pseudomonas fluorescens Pf-5
  CDS (1)..(1461): transl_table=11
atgatcaaatcgttgcgtcctctgttgctggccagtgtttttctccccctggcctttcccgtttccgcggctccggtcaacaccaccctgacccccaaggtccagcaagccctcaaagccagcaaacttccggataacgccctgtccctggtgatgattcccctgaacggccccggcaccccgaccatctacaacgccgacgtatcggtgaacccggcctccaccatgaaactggtgaccacctacgcagccctggaaatgctcggcccgacccaccagtggaaaaccgagttctacaccgacggcaccctcagcggcggcatcctcaatggcaacctgtacctcaagggcggcggcgaccccaagatgaacatggagaagctctggctgctgatgcgtgacctgcgggccaatggcgtacagcaagtcactggcgatctggtgctggaccgcaacttcttcgtgcagccgcaactgccggaattcaatgacgatggcaacgacgagaacaagccgttcctggtcaagccggacgccctgatggtcaacctcaaggccctgcgcttcgttgcccgcaatgactcaggacgggtcctggtttcggtggagccgccgatcgccaagatccgcatcgacaaccaggtcaaggcggtcaacaccaagcagtgcaccggagacgtgcgctacaaccccgtcacccaggccgatggcagcgtgatcgtgaccgtcggcgggcagttgggtgatggttgcagttcccagacttacctgtcgctgctggaccacgccacctacaccgccggcgcggtgcgggcgatctggagcgagctgggcggcagcatccagggccaggatcgcctggccgtggtacccaaggatgccaaggtcctggcccgcgccttctccccggacctcgcggaaatcatccgcgacatcaacaaatacagtaacaacaccatggcccagcagttgttcctgagcctgggggccaagtaccgcaacgaagccgatggcgacgacgccaaggcggcccagcgtgtggtgcgccaatggctggcgaagaaaggcatcacctcgccgcacctggtgatggagaacggttccggcctgtcgcgtgccgagcgggtcagtgcccgggaaatggccggcctgctgcaagcggcgtggaaaagcccctacgccgccgagttcatcagctcgatgccgatcgccggcatggatggcaccatgcgcaagcgcctcaagcgcaccgccatgtccggtgaggcgcacatcaagaccggcaccctgaacaccgtacgcgccatcgccggctacagccgcgacgacaacggcaatacctgggcggtggtggcaatcctcaacgatccacggccattcggcgcctcttcggtgctcgaccaggtcctgctggacctgtaccgccagccgaaactggcgaccagcgcttcggtgctgtaa

SEQ ID NO: 674 - protein, 486 aa, Pseudomonas fluorescens Pf-5
MIKSLRPLLLASVFLPLAFPVSAAPVNTTLTPKVQQALKASKLPDNALSLVMIPLNGPGTPTIYNADVSVNPASTMKLVTTYAALEMLGPTHQWKTEFYTDGTLSGGILNGNLYLKGGGDPKMNMEKLWLLMRDLRANGVQQVTGDLVLDRNFFVQPQLPEFNDDGNDENKPFLVKPDALMVNLKALRFVARNDSGRVLVSVEPPIAKIRIDNQVKAVNTKQCTGDVRYNPVTQADGSVIVTVGGQLGDGCSSQTYLSLLDHATYTAGAVRAIWSELGGSIQGQDRLAVVPKDAKVLARAFSPDLAEIIRDINKYSNNTMAQQLFLSLGAKYRNEADGDDAKAAQRVVRQWLAKKGITSPHLVMENGSGLSRAERVSAREMAGLLQAAWKSPYAAEFISSMPIAGMDGTMRKRLKRTAMSGEAHIKTGTLNTVRAIAGYSRDDNGNTWAVVAILNDPRPFGASSVLDQVLLDLYRQPKLATSASVL

SEQ ID NO: 675 - DNA, 1467 bp, Pseudomonas syringae pv. phaseolicola 1448A
  CDS (1)..(1467): transl_table=11
atgatcaagtcgctacgtccattgttgctcgcgtcaattcttttgccactggctctgccctcctacgctgccgtcatcaacaccacgctgccccccaaggttcaacaggctctgaaagccagcaaactcggcgatgacgcgctttcgctggtgatgttgccgctcaacgggccgggcacgccgaccgtgttcaatgccgacgtatcggtcaacccggcctcaaccatgaagctgatcaccacctacgccgcgctggaaatgctcggccctacccaccagtggaaaaccgaattcttcaccgatggcaccctgagcaacggcgtgctgcgcggcaacctgtacctcaaaggcggcggcgatccaaagctgaatatggaaaaactctggctgctgatgcgtgacctgcgcgccaacggtgtgcaacaggtgactggtgacctggtattggaccgcagccattttgtgcagccgcaattgcccgaattcaatgatgacggcaacgatgataacaagccgtttctggtcaagcctgatgcgctgatggtcaatctcaaggcattgcgcttcgtgacccgaaacgatgacggcagaattctggtctcggtcgagccgccgattgcgaccattcgcatcgacaaccaggtgaaggcgagcgcatcaaagcaatgcaccggggatgtgcgctacaacccggtcacccagcctgacggcagcgtcaatgtgacggtgactggccagttgggcaacggctgcaattcgcagacctacctttcgctgcttgaccatccgacctatgcggcaggcgcagtacgggccatctggcaggaactgggcggcactatccagggcaaggaccgcgttggcgttttgcccggtaatgccaagctgctggccaaggctttttcgccggatctggtggaagtcattcgtgacatcaataaattcagcaacaacaccatggcccagcaactgtttctgagcctgggtgaagagttccgcaatgaagctgacggtgacgacggcaaggctgcccagcgcgtcatccgccagtggctggcgaaaaaaggcatcaccgcgccgcatctggtcatggagaacggctccggcctgtcgcgtgcggaacgtgtcagtgcccgtgagatggccattattctgcaggctgcgtggcgcagcccgtatgctgccgaattcatgagttcgatgccgttggcaggcatggacggcaccatgcgtaaacgtctgaagcgcaccccattgctgggtgaagcgcacatcaagacaggcacgctgaacacggttcgcgctattgccggcttcagccgcgacagcaacggcaacacctgggcggtcgtggcgatcctcaacgatccgcgtccgtttggcgcatcctcgatactggacgaggtactggtcgatctgtatcgacagccgaaactgaccaacaccacggtctcgatccagcaataa

SEQ ID NO: 676 - protein, 488 aa, Pseudomonas syringae pv. phaseolicola 1448A
MIKSLRPLLLASILLPLALPSYAAVINTTLPPKVQQALKASKLGDDALSLVMLPLNGPGTPTVFNADVSVNPASTMKLITTYAALEMLGPTHQWKTEFFTDGTLSNGVLRGNLYLKGGGDPKLNMEKLWLLMRDLRANGVQQVTGDLVLDRSHFVQPQLPEFNDDGNDDNKPFLVKPDALMVNLKALRFVTRNDDGRILVSVEPPIATIRIDNQVKASASKQCTGDVRYNPVTQPDGSVNVTVTGQLGNGCNSQTYLSLLDHPTYAAGAVRAIWQELGGTIQGKDRVGVLPGNAKLLAKAFSPDLVEVIRDINKFSNNTMAQQLFLSLGEEFRNEADGDDGKAAQRVIRQWLAKKGITAPHLVMENGSGLSRAERVSAREMAIILQAAWRSPYAAEFMSSMPLAGMDGTMRKRLKRTPLLGEAHIKTGTLNTVRAIAGFSRDSNGNTWAVVAILNDPRPFGASSILDEVLVDLYRQPKLTNTTVSIQQ

SEQ ID NO: 677 - DNA, 1515 bp, Ralstonia eutropha JMP134
  CDS (1)..(1515): transl_table=11
atggccgccatgccaaaaagaatcaccgtattttgtgcggcagccctgctgctcgccgccacccagccgcccgttctggcccgcccggccaaggcgatcaagacttccgccagcgcgcgggcggatggtgcgctcgtacgcgccggcttgccggccccggtcgccacggcgctgcagcgcgcgcacgtgccggccagcgcggccagtttctatgtcgtgaaaatcggggcgccgcaggcgcgcgcaagctggaacgcgcagcagccgatgaaccccgcttcgaccatgaagctggtcaccacgtttgccggactgcagttgctgggccccgactaccgctggcagacctcgctctatgccgacagccagcccgccggcgacgggacggtcaacggcaatgtctacctgcgcggacgcggcgacccgaagctggtgccggaggaaatggccaagctcgtcgccaccgcgcgcgcggccggcgccaccacgatcaatggcgacctggtgcttgaccgcagcttctttgccgatggcctgaacgggaacggcaccatcgatggcgaagtccagcgcgcgtacaacgtcagccccgacgcactgctgtacgcgttcaagacgctgtcgttcacgctcacccccaacgatgccagccagaccgtggcggtctcggtcacgccggcgctcgcgcaactgcgcctggacaaccgcctgacgctgaccaatggccgctgcggcgactggcaatcgagcgccacgccgaccgtggcgccgcaggccgacggcacggtgctggcgtcgttctcgggcaactattcgagcgactgcggcgagcacgtgctcaatatcgcggcgctgtcgcatgccgagttcacgtggggcggcttcgtggccgagtggcaggccgcgggcggccgtttcacgcacgtgccggcgatgcgcagcggctccgtcccgcgcggcgcggtgctgctggcgcgccactacggccagccgctcggcgcgatcgtgcgcgacatcaacaagtattcgaacaacgtgatggcgcgccagctgttcctgaccatcggcgcggagatggatcgcagcgggccggccagcaccgcgcgctccacgcgcgtagtgcagcgctggctgagccgccagggcctggatatgcagggactggtgctcgacaacggctcgggcctgtcgcgcgacgaacgtatcagcgcctacgacatggcgcggctgctgcagcaggcggccgcgagcaacgtcgggccgacgctggtcgattcgctgccgatcctgggcgtcgacggcaccttgcgcaaccggctcacgcgcgccaacgccgccggcaatgcttacctcaagaccggcacgctgcaggacgtacgcgcgctggccggctatgtcgatgcgctcaatggcgaacgttacgtggtggtgagctttatcaaccacccgaacgcctcacaggcgcaggaagcccatgatgcgctgatgcagtgggtgtatcgcggcgcaccctga

SEQ ID NO: 678 - protein, 504 aa, Ralstonia eutropha JMP134
MAAMPKRITVFCAAALLLAATQPPVLARPAKAIKTSASARADGALVRAGLPAPVATALQRAHVPASAASFYVVKIGAPQARASWNAQQPMNPASTMKLVTTFAGLQLLGPDYRWQTSLYADSQPAGDGTVNGNVYLRGRGDPKLVPEEMAKLVATARAAGATTINGDLVLDRSFFADGLNGNGTIDGEVQRAYNVSPDALLYAFKTLSFTLTPNDASQTVAVSVTPALAQLRLDNRLTLTNGRCGDWQSSATPTVAPQADGTVLASFSGNYSSDCGEHVLNIAALSHAEFTWGGFVAEWQAAGGRFTHVPAMRSGSVPRGAVLLARHYGQPLGAIVRDINKYSNNVMARQLFLTIGAEMDRSGPASTARSTRVVQRWLSRQGLDMQGLVLDNGSGLSRDERISAYDMARLLQQAAASNVGPTLVDSLPILGVDGTLRNRLTRANAAGNAYLKTGTLQDVRALAGYVDALNGERYVVVSFINHPNASQAQEAHDALMQWVYRGAP

SEQ ID NO: 679 - DNA, 1407 bp, Methylobacillus flagellatus KT
  CDS (1)..(1407): transl_table=11
atgatgaggttgcttctggcgagcctgttgctgggaatgagcacgttgcttcatgctgctgccatcccggagccggtcagtgagctgctcaggaaaagcggtattcccgccgagaatgtcgccgtctatgtgcagcgcgtcgatcaatcatcgcccttggtggatcaccaaagcgatcgtccgatgaagacggcttcgaccatgaagctgttgagcacttatgccgggctggagctgctggggccgggctatcgctggcgtactcaggtttaccatgatggcagtctcgaagatggtgtcttgcacggcaacctgatcattcaggggcgcggcgacccttatctgctggctgccgatatgcggatgatgctggaaaatttgcgcctggcaggtgtggaggatattcagggagatatcgtgctcgatacccactacttcgcccgacgttttcacgataccgctgaattcgatggtaagccgcatgcgccctacaatgctgttcctaatgcgtttgccgtcaatatcaagtctacttcattccacttcctggtcgagagaggcaagctggccatagaggccgatcccatcctgccggaaattcacattcataaccaaaccaatctggtgcgcggcgagtgcggagactggaaaagccgcctgaggtttgtcgtagagccgatggggaacgaggtggcggtgacattcaagggagattatcccttggcctgcggcagtaagacgctggaactgaatgtgcttgaagacggaccctatgcctatggcttgtttcgaagcaattggctttcgctagggggcaagctccagggagggtggcgctatggcgtgcttcctgaagatgcaaggttgctgctcacgcacgattcgctgccgctgtcggaaatcatccgcacgattaacaagtacagcaacaatctcatggtcaggcagctgttcctgacgatgggagcagagcgagtttccagcccggcgatggaggcggacggtgttctagccgtcaaggcatggcttgccagcaaggggctgcacttcccggagctggtgctggagaatggttcggggctttcacgccatgaacagataacagcgagacatatggcggctttcctgttggcggcgtatgccagccccgtcatgccggaatatctttccgccctgcctattccctccgtggatggcaccatggccaatcgcctgcgccacagcgaggccaggggaagcgcgcacctgaaaaccgggacgatcaacggcgtgagcgccttggcaggctatgtgcacgaccgcagggggcggcgctgggtagcggtgatcatggtaaacgaccccaaggccagcagttcgcgtgctgctcaggacgcacttatcgactggatttatcatcggccctga

SEQ ID NO: 680 - protein, 468 aa, Methylobacillus flagellatus KT
MMRLLLASLLLGMSTLLHAAAIPEPVSELLRKSGIPAENVAVYVQRVDQSSPLVDHQSDRPMKTASTMKLLSTYAGLELLGPGYRWRTQVYHDGSLEDGVLHGNLIIQGRGDPYLLAADMRMMLENLRLAGVEDIQGDIVLDTHYFARRFHDTAEFDGKPHAPYNAVPNAFAVNIKSTSFHFLVERGKLAIEADPILPEIHIHNQTNLVRGECGDWKSRLRFVVEPMGNEVAVTFKGDYPLACGSKTLELNVLEDGPYAYGLFRSNWLSLGGKLQGGWRYGVLPEDARLLLTHDSLPLSEIIRTINKYSNNLMVRQLFLTMGAERVSSPAMEADGVLAVKAWLASKGLHFPELVLENGSGLSRHEQITARHMAAFLLAAYASPVMPEYLSALPIPSVDGTMANRLRHSEARGSAHLKTGTINGVSALAGYVHDRRGRRWVAVIMVNDPKASSSRAAQDALIDWIYHRP

SEQ ID NO: 681 - DNA, 1557 bp, Acidobacteria bacterium Ellin345
  CDS (1)..(1557): transl_table=11
atgtcccgctcgcggaccattccggctctcttcttcctcgttctcatcgcgctgtacgcgcctgcggccgacaaactctcgtcgaagatcgacagagtcctctccgcgcccgacgtctcacgcgcattctggggcatcgagatcgtctcgctcgacaacggcaaaacgctctattcgcgcaacagcgacaagctctttacgcccgcatccaacaccaagctcttcaccacctcgacagcgttcgcgctgctcggtcccgacttccgcttccataccacggtcgagacctcaggcacagtcgacaagcgtggccgcctcgattctgacctcgtcattgtgggtcgcggcgatccgaacctctccggtcgtactctgccctacaacctgcgcaccgaacgtaagcaaccgccgattgctgcgctcgagaacctcgccgaccagctcgtccaaaagggcgttcgctacgtagatggcgacatcgttgccgacgactcctactacgccttcgagcgctacggtgaagggtgggcgcaggatgaccttgtctgggagtggggagcgccggtatcagcgctgaccgtcaatgacaacgtgatcttcgtcagcattcagcccgccgatcgcgtcggcgaacgcgcctttgtggacatcactccgtttccggcgtactaccgcgtggacaaccgcgttatgaccactccacagggaaccggcccgcgcaagatctacatcaaccgtgagccgggttcgaaccagctcacgttgtgggggaacattccggtcgatgaccagggcgctaacgaagcgcttgccatcgaagaccctgccgacttcaccgcgaagctcttccgcgaactcctcgacaagcgcggcgtcaccgtatacggacgcccgaagaccaagcacaccgagttggcatcgctctccacgttcagcatcaccgcgacggcctcagccggaggcggcgccgatcgcgcgcccgctccggtttcacgcctgcctctggtgctcggacagtacgattcgcagccgctctccgccgatctcaaagtcatcaacaaggtcagccagaaccttcacgccgaattactgctgcgtttgctcggcaaggagaagggaactgccggcacgatcgaaggcggcctcgaagttgagcgggccttcctcgcctccgccgatattcgtcccgaggaatacacgctctacgacggaagcggtctttcacggcaggacctcgccacgccgcacgcgttcgtgaagctcctgacctacgcgcacaagcaaccatggggcgcgaccttcgaggatacgctgcccgtcgcaggtgtggacggttcgctcgtggaacgctttaccaagtcgaccgcgcaaagccgcgtacacgccaagaccggttctctcgaccatgtgaattcgttgtcgggctatttaactaccgagaagggcgagcacgtggtgttctcgatcctgtcgaacaaccacaacctcaccaacaagcatgccattgagacgatcgacgcgattgtgcaggcggtcgtggatagcgggaagaagtag

SEQ ID NO: 682 - protein, 518 aa, Acidobacteria bacterium Ellin345
MSRSRTIPALFFLVLIALYAPAADKLSSKIDRVLSAPDVSRAFWGIEIVSLDNGKTLYSRNSDKLFTPASNTKLFTTSTAFALLGPDFRFHTTVETSGTVDKRGRLDSDLVIVGRGDPNLSGRTLPYNLRTERKQPPIAALENLADQLVQKGVRYVDGDIVADDSYYAFERYGEGWAQDDLVWEWGAPVSALTVNDNVIFVSIQPADRVGERAFVDITPFPAYYRVDNRVMTTPQGTGPRKIYINREPGSNQLTLWGNIPVDDQGANEALAIEDPADFTAKLFRELLDKRGVTVYGRPKTKHTELASLSTFSITATASAGGGADRAPAPVSRLPLVLGQYDSQPLSADLKVINKVSQNLHAELLLRLLGKEKGTAGTIEGGLEVERAFLASADIRPEEYTLYDGSGLSRQDLATPHAFVKLLTYAHKQPWGATFEDTLPVAGVDGSLVERFTKSTAQSRVHAKTGSLDHVNSLSGYLTTEKGEHVVFSILSNNHNLTNKHAIETIDAIVQAVVDSGKK

SEQ ID NO: 683 - DNA, 1542 bp, Shewanella sp. MR-4
  CDS (1)..(1542): transl_table=11
atgacgcactcgataaacaaggatcagttacaggcatcattcactcgccccaagcttaagggattacttttaggcagcatgttaagtattctgctgccaacccaagcgattgcagcaattcatccgctggatgagtcgacatttgccaagcaaatcgccgacattgccccgcgtcattcgcaagtcgctttgctggcccgtgatttaagtactaataccctgttatacagccagcaagccgataccttatttatccccgccagcacgcaaaaggtgctgaccgccgtgaccgctatggccagccttggcccagattttcgctatgtcactgagctctggagtgatgcgcccattcgccaaggtcatattgcgggcagtgtttatctgcgttttagcggcgatccaacgctgactcaggacgatctcaaagccttgtttgcccatctacaaaagcaaggcataacaagcattgaggggcatctctatctgatcggggataaacaggaacaattacaagcacctggttgggtgtgggatgacctagggatttgctttgcagcgccggtatccagttacatcatcaatcaaaactgcgtttatgggcagtttgcgccaagctcagccaaacatgcctctgaggtcaaattaagggcatccagttttggggtgaaagtcagtagcgatgccatattctcccctaaagcaggccatgatttttgccagctcgatttagtacgccttggccaaaaccaatatcatctacgcggctgctatcccggcagtgaagcgataccactggcgattgccattagcgatcccgaaaaatttgccatggacaccctaaccgcgacgctcaagggggaaatatcactttcggggaaagtgaaaataggcaataccatcccttctaaggcgaaactgattgccagccatagcagcgcgcccttgcctgagctgttaaaaaccatgctgttgaagtcggataacctcatcgccgacagtttgtttaagcgcgtggggcaaaattattacaaagcccaaggcagctttacccatggtgctgcggctatgcgccatattctgactgagcttgggattgatttaaccaacgctaatattgtcgatggttcagggctttctcgctataacctgttgagcgcaaaacagttagccgatgtactggcgctcatttaccaagatgcacgctttcacaccctcattgacagtttgcccgaggccggtgtcagcggcacactgcaatatcgcttgggatatactaaaccgcccttaaaacatctagtgtttgccaagaccggctcgatgcagggcgttgccaatttagctggctttatgcgtttagcgcagcaacgggatattctatttgtggtacttgagaacggcattagccccgaaactaaaaaacagcgtaaacccgcctttagcgccgattttttaactcggctgctgagcgctgtcgaaactcagactcagaccagccaaacaacgaccacagagctgagcaccgttaagttaagtgattaa

SEQ ID NO: 684 - protein, 513 aa, Shewanella sp. MR-4
MTHSINKDQLQASFTRPKLKGLLLGSMLSILLPTQAIAAIHPLDESTFAKQIADIAPRHSQVALLARDLSTNTLLYSQQADTLFIPASTQKVLTAVTAMASLGPDFRYVTELWSDAPIRQGHIAGSVYLRFSGDPTLTQDDLKALFAHLQKQGITSIEGHLYLIGDKQEQLQAPGWVWDDLGICFAAPVSSYIINQNCVYGQFAPSSAKHASEVKLRASSFGVKVSSDAIFSPKAGHDFCQLDLVRLGQNQYHLRGCYPGSEAIPLAIAISDPEKFAMDTLTATLKGEISLSGKVKIGNTIPSKAKLIASHSSAPLPELLKTMLLKSDNLIADSLFKRVGQNYYKAQGSFTHGAAAMRHILTELGIDLTNANIVDGSGLSRYNLLSAKQLADVLALIYQDARFHTLIDSLPEAGVSGTLQYRLGYTKPPLKHLVFAKTGSMQGVANLAGFMRLAQQRDILFVVLENGISPETKKQRKPAFSADFLTRLLSAVETQTQTSQTTTTELSTVKLSD

SEQ ID NO: 685 - DNA, 1542 bp, Shewanella sp. MR-7
  CDS (1)..(1542): transl_table=11
atgacgcactcgataaacaaggatcagttacaggcatcattcactcgccccaagcttaagggattacttttaggcagcatgttaagtattctgctgccaacccaagcgattgcagcaattcatccgctggatgagtcgacatttgccaagcaaatcgccgacattgccccgcgtcattcgcaagtcgctttgctggcccgtgatttaagtactaataccctgttatacagccagcaagccgataccttatttatccccgccagcacgcaaaaggtgctgaccgccgtgaccgctatggccagccttggcccagattttcgctatgtcactgagctgtggagtgatgcgcccattcgccaaggtcatattgcgggcagtgtttatctgcgttttagcggcgatccaacgctgactcaggacgatctcaaagccttgtttgcccatctacaaaagcaaggcataacaagcattgaggggcatctctatctgatcggggataaacaggaacaattacaagcacctggttgggtgtgggatgacctagggatttgctttgcagcgccggtatccagttacatcatcaatcaaaactgcgtttatgggcagtttgcgccaagctcagccaaacatgcctctgaggtcaaattaagggcatccagttttggggtgaaagtcagtagcgatgccatattctcccctaaagcaggccatgatttttgccagctcgatttagtacgccttggccagaaccaatatcatctacgcggctgctatcccggcagtgaagcgataccactggcgattgccattagcgatcccgaaaaatttgccatggacaccctaaccgcgacgctcaagggggaaatatcactttcggggaaagtgaaaataggcaataccatcccttctaaggcgaaactgattgccagccatagcagcgcgcccttgcctgagctgttaaaaaccatgctgttgaagtcggataacctcatcgccgatagtttgtttaagcgcgtggggcaaaattattacaaagcccaaggcagctttacccatggtgctgcggctatgcgccatattctgactgagcttgggattgatttaaccaacgctaatattgtcgatggttcagggctttctcgctataacctgttgagcgcaaaacagttagccgatgtactggcgctcatttaccaagatgcacgctttcacaccctcattgacagtttgcccgaggccggtgtcagcggcacactgcaatatcgcttgggatatactaaaccgcccttaaaacatctagtgtttgccaaaacaggttcgatgcagggcgtcgccaatttagctggctttatgcgtttagcgcagcagcgagatattctctttgtggtgctcgagaatggcatcagtcctgaaaccaaaaagcaacgtaaacccgcctttagcgccgactttttaactcggttgctgagtgctgtcgaaactcagactcagaccagccaaacaacgaccacagagctcaacaccgttaagttaagtgattaa

SEQ ID NO: 686 - protein, 513 aa, Shewanella sp. MR-7
MTHSINKDQLQASFTRPKLKGLLLGSMLSILLPTQAIAAIHPLDESTFAKQIADIAPRHSQVALLARDLSTNTLLYSQQADTLFIPASTQKVLTAVTAMASLGPDFRYVTELWSDAPIRQGHIAGSVYLRFSGDPTLTQDDLKALFAHLQKQGITSIEGHLYLIGDKQEQLQAPGWVWDDLGICFAAPVSSYIINQNCVYGQFAPSSAKHASEVKLRASSFGVKVSSDAIFSPKAGHDFCQLDLVRLGQNQYHLRGCYPGSEAIPLAIAISDPEKFAMDTLTATLKGEISLSGKVKIGNTIPSKAKLIASHSSAPLPELLKTMLLKSDNLIADSLFKRVGQNYYKAQGSFTHGAAAMRHILTELGIDLTNANIVDGSGLSRYNLLSAKQLADVLALIYQDARFHTLIDSLPEAGVSGTLQYRLGYTKPPLKHLVFAKTGSMQGVANLAGFMRLAQQRDILFVVLENGISPETKKQRKPAFSADFLTRLLSAVETQTQTSQTTTTELNTVKLSD

SEQ ID NO: 687 - DNA, 1443 bp, Alkalilimnicola ehrlichei MLHE-1
  CDS (1)..(1443): transl_table=11
atggtgagacaacgcgtcctgtgcgggctttggctgtgcggcctctggctgttgctggtgccggggagtggcgtggcggcggggctgcccgacgcgctggcccaggcggtcgaccgcctgggcgtggaccgggaacaggtgagtatctgggtgcagcgtgtgggcgagccggagcccttgctggcccaccaggtcgataccgcgcgcaatccggcctccgtgctcaagctggtgaccagctttgcggccctggagggcctggggccggattaccgctggcggaccgagctgtacgccctgggtcctgtccgggacggggtcctggagggggatctgctgatccgcggcgggggcgaccccttcctggtgaccgaggagttctggaagctcaccggggccctgcggcgccagggggtgcgggagatcaccggcgatctggtctatgacctgagctatttcaacctctatcccgaggacccgggggcctttgacgggcggccacaccgggcctacaaccaaccgccgcacccgctgctggtgaacttcaacgccatcagtttcgagattaagcctaccaccggcggcgccccgcgcgtggtggccgaccccccgctgccggggctgaccctggacaaccgactgggcctgcgccagagcggctgcggcgggttccagcgcgggatcgccttccaggtggtcgagcagcccggcggcagcctgcccggggtgctgctggaggggcggtaccccagccattgtgatgagtggcgcctggtccgcaccgtgctgccggtggaggactatgtccaccagttgtttaccctgctttgggggcaatggggcgggatctttgccgggggctggcgcgagggccgggggcccgcccccggcgccgagccggtggtggtgcacgagtcgccgccgttggggcagttgctgcggctggtgaacaagtacagcaacaatgtgatgacccggcatctgaaactgaccctgggggcggagcattacggtgcgccggcgacctcggaaaagggccgccggtcggtactggacgtgctgcacgcccacggcatcgataccgcgggcatagtctttgacaatggcgcgggcctgtcccgtgacacccgcatcacggcgcgccaggtggcgcagttgctgacggtggcgcgggagcggccgtggatggcggagttcgtctcctcgctggccatcgccggcaccgacggcaccatggggcgccgtttccaggacggtccggagcgcgggcggatgcacttgaagaccggccacctgaacgacgtggcggccattgccggttacctccacccgccgggggcggagccgttggtggccgtggtactggttaaccacccggatgcccaccgcggtgcgggacgcgggattcaggaggcggtgctccgttgggcctttgctcagtga

SEQ ID NO: 688 - protein, 480 aa, Alkalilimnicola ehrlichei MLHE-1
MVRQRVLCGLWLCGLWLLLVPGSGVAAGLPDALAQAVDRLGVDREQVSIWVQRVGEPEPLLAHQVDTARNPASVLKLVTSFAALEGLGPDYRWRTELYALGPVRDGVLEGDLLIRGGGDPFLVTEEFWKLTGALRRQGVREITGDLVYDLSYFNLYPEDPGAFDGRPHRAYNQPPHPLLVNFNAISFEIKPTTGGAPRVVADPPLPGLTLDNRLGLRQSGCGGFQRGIAFQVVEQPGGSLPGVLLEGRYPSHCDEWRLVRTVLPVEDYVHQLFTLLWGQWGGIFAGGWREGRGPAPGAEPVVVHESPPLGQLLRLVNKYSNNVMTRHLKLTLGAEHYGAPATSEKGRRSVLDVLHAHGIDTAGIVFDNGAGLSRDTRITARQVAQLLTVARERPWMAEFVSSLAIAGTDGTMGRRFQDGPERGRMHLKTGHLNDVAAIAGYLHPPGAEPLVAVVLVNHPDAHRGAGRGIQEAVLRWAFAQ

SEQ ID NO: 689 - DNA, 1443 bp, Hyphomonas neptunium ATCC 15444
  CDS (1)..(1443): transl_table=11
atgatcaggccccgctttctctctggcgcgctcgccgctgtcgtctttgcggtgtcggcctgtaccaccacacctgccgagccgcccccgccagcgcccttcgaggcgatgcaggtggagggcgtgcgctggggcgtttcggtcatgacgctggacgggcgggaggtgttttcgcgcagcgctgaggagcggttcattccggcctccaacaccaaggtgttcacatcggccgccgcgtttcactatctcactggcctggatacgccagacccggccgggggcacgtcgctctggctggagccgggcggggagggcgaggcgcctgatcttgtgctgatgggcgctggcgatccgggcctcatggatagtgccgattgcgtggataattgcctgcatcagctcgcggacgctgtggtcgctgccggcatcacgcgcgtgggagatgtgatcggggacgacaccctgctgcccgccgcgctctgggggcaggggtggagctggaacaatttcgtctggtattatactgcgcccatctcagctttgacggtgaatgagaatacgctcggattgaccgtctctccgggcgcagcgccgggcgagccagcggtgctcagctgggcgccgggagatgatctcctcctggtcgataataaagttatcacgggaccgccgggcagcttgcagacgctgcgcatggtgcgggtgcccggcctcgagatgcttcggctcaccgaatatattccggctgatgccgcgccgcgcatgtatgcggtggcgatgcacgatccggcggagacagcggcgctgcgctttgtccgtctcctgatagagcgcggggtaaccgttgagggcctgatgcgcgcgcgccatgaggcggatgatagtccggccgagcaggtgctgatcgctcgtctcacgccggcgccgatcaaggcaagcatcggccgcatcctcgtcaacagccagaacctgcatgccgagcttttgttgcgcaagattgcgctcgcgcgggggcagctttcgcctgagggcggccaggaagtgctcaccgcgctggtggctgaagcggggctgacgccggtggaagcggagctcttcgatggctcgggcctctccacctataaccgggtcacgccgcgcggtatggcgcagttcctgcgctgggctgccggccagccttggggagacgcctggcgcgccatgctgcccgtgggcggggcagacggcacgctggcgcgccgcttcaagggcacgtctctggagggcaaggtgttcgccaagaccggttcgctgcacggcgtcaacgcgctctccggctacatgaccgcgcgcagcggccagacgctggtgtttgccgtctacgccaatgaccgcccggcagacgccccctcgatcatcgccgagatggacgccaatctggtgcgcatcgccgaagcgaattag

SEQ ID NO: 690 - protein, 480 aa, Hyphomonas neptunium ATCC 15444
MIRPRFLSGALAAVVFAVSACTTTPAEPPPPAPFEAMQVEGVRWGVSVMTLDGREVFSRSAEERFIPASNTKVFTSAAAFHYLTGLDTPDPAGGTSLWLEPGGEGEAPDLVLMGAGDPGLMDSADCVDNCLHQLADAVVAAGITRVGDVIGDDTLLPAALWGQGWSWNNFVWYYTAPISALTVNENTLGLTVSPGAAPGEPAVLSWAPGDDLLLVDNKVITGPPGSLQTLRMVRVPGLEMLRLTEYIPADAAPRMYAVAMHDPAETAALRFVRLLIERGVTVEGLMRARHEADDSPAEQVLIARLTPAPIKASIGRILVNSQNLHAELLLRKIALARGQLSPEGGQEVLTALVAEAGLTPVEAELFDGSGLSTYNRVTPRGMAQFLRWAAGQPWGDAWRAMLPVGGADGTLARRFKGTSLEGKVFAKTGSLHGVNALSGYMTARSGQTLVFAVYANDRPADAPSIIAEMDANLVRIAEAN

SEQ ID NO: 691 - DNA, 1431 bp, Pseudomonas aeruginosa UCBPP-PA14
  CDS (1)..(1431): transl_table=11
atgttcaagtcgctgcgtactcttgccttcgccacgctcctgcctttcgcccttcccaccctcgcccaggtcaacgccaccctgccggccaacgtgcagaaagccctgcagaccaacaagctgaccggcaacgatctgtcgctggtgctgattccgctcgacggcccgggcaaccccacctactacaacgccgacgtatcggtgaacccggcctcgaccatgaagctgttcaccacctatgccgccctggaaatgctcggcccgacctaccagtggaagaccgagttctacaccgacggccagctcaagaacggagtgctcaacggcaacctctacctcaagggcggcggcgatccgaaactgaacatggagaagctctggctgttgatgcgtgacctgcgcgccaatggcgtgaccaaggtcacaggtgacctggtactcgaccgcagctacttcaacatccctcatttgccggtattcaacgacgacggcggcgacgacaccaagccgttcctggtcggtccggactcgctgctggtcaacctgaagagcgtgcgcatggtggtgcgcaccgacggcaacaaggtcaacgtgcagatggacccgccgctggccaacgtacgcatcgacaaccaggtgaagatgaccgcgccggccacctgcccggcctggccgaagctgcgcttcagcccggtgacccagttcgacggcaccaccctgctggccaccggacagattccccagggctgtagcgcgcagacctacatgtcgctgctcgaccatcccggctacaccgccggcgcggtgcgcggcatctggcaggaactgggcggcagcatcctcggcaaggaccgccagggcagcgtaccgcgcaacgccacgctgatcgccaaggccttctcgccagacctggtcgagatcatccgcgacatcaacaaatacagtaacaacaccatggcccggcagttgttcctctccatcggcgcgcagttccgcaacagcgccgacggcgacgacgcccaggccgcgcagcgggtggtgcggcagtggctggcgcgcaagggcatcaccgcgccgcgcctggtgatggagaacggctcgggactgtcgcgccaggaacgggtcagcgcccgtgagatggcggcgatgctgcaagccgcctggcacagcccctatgcagcggagtacatctcctcgctgccgctggccggcctcgacggcaccatgcgcaaacgcctgcggcgcaccgcactggtcggcgaggcgcacgtgaagaccggcaccctcaacaccgtgcgcgccctcgccggcttcagccgcgacgccagcggccacaactgggtggtggtggcgatcctcaacagcccgcggccgtggggcgcttcggcgatcctcgaccaggtactgctgagcctgcacgcgcggaaataa

SEQ ID NO: 692 - protein, 476 aa, Pseudomonas aeruginosa UCBPP-PA14
MFKSLRTLAFATLLPFALPTLAQVNATLPANVQKALQTNKLTGNDLSLVLIPLDGPGNPTYYNADVSVNPASTMKLFTTYAALEMLGPTYQWKTEFYTDGQLKNGVLNGNLYLKGGGDPKLNMEKLWLLMRDLRANGVTKVTGDLVLDRSYFNIPHLPVFNDDGGDDTKPFLVGPDSLLVNLKSVRMVVRTDGNKVNVQMDPPLANVRIDNQVKMTAPATCPAWPKLRFSPVTQFDGTTLLATGQIPQGCSAQTYMSLLDHPGYTAGAVRGIWQELGGSILGKDRQGSVPRNATLIAKAFSPDLVEIIRDINKYSNNTMARQLFLSIGAQFRNSADGDDAQAAQRVVRQWLARKGITAPRLVMENGSGLSRQERVSAREMAAMLQAAWHSPYAAEYISSLPLAGLDGTMRKRLRRTALVGEAHVKTGTLNTVRALAGFSRDASGHNWVVVAILNSPRPWGASAILDQVLLSLHARK

SEQ ID NO: 693 - DNA, 1509 bp, Solibacter usitatus Ellin6076
  CDS (1)..(1509): transl_table=11
atgaccgcgaagcagcgcgccgctgtcgcgacattcttactcgcagccctcgcatcccagtgcgccgccgccggattgccggaggccattcagaaattgatcgattcctcccctgccgcgcgcaccgccttctggggaatccagatcgtcgatctcgccagcggcaagaccctctacgagctcaatcctgatcactacttcgtccccgcctcgaacgccaagctcttcagtaccgcgctcgcactgacccgcctcggccccgactacaccttccagacccgcgtcttcgccgacgccccgcccgattcccagggccgcatctctggcgacctgcgcctcatcggcggcggcgatccgaacctctccgcgcgcgccatcccttatcgaatgggcccccccaccggcaatcccctcgccgccatcgaagacctcgccgaccagctcgccgcccgcggcatccgcatcgtctccggcgacatcgtcggcgacgacacctggtacgtctggcagccctacgcggtcggctgggcgatcgacgatccacaatccgacgatggcccgcccatctccgccctcactctctccgataacgccctcaacctttcggtgcatccgggcgccgccgtcggcgaggtcgcagagctcgccttcagcccgcctttggagttctaccgcatcgagaatcgcgtgcgcaccgtcgccgccggaggcgagcgccgcgttcactttcaccgcatccccggcagccgtgacgccgtcctgtggggaaccatcccgctgcgcgaccgcggccaggacatgctgacctctgtcgaagatcccgccgagttcgccgccgaggccctgcgcaacgcgctcgaggcgcgcggcatcacggtcgaaggcgccgcccgctcacagcacctcttccccaatcagctcgccgatctcacacaagcgcctccctcggaggcggttggcggagtggaactcgcgaatcgctcctccgcccgccttgtcgaagacctgcgcgtaaccgccaaggtcagccagaacctgcacgccgaactcctgcttcgcgccgtgggccgcgcccgccgcaacgtgggcagcttcgaggcgggtatgaccgagatgaagatttttctcgccgacgcaggcgtggagccgaccggctataacctgctcgatggctccggcctcagccgcctggacctggtcacgcccgccaccgtcgtcagactcctccgcttcatgtacgattcgccggcgcgcgataactggctttccatctttcccatcggcggccaggatggcaccctcagcacacgtttcgggggcactccggctgccggccgcgtcctcgccaagaccggctccctctcccacgtcagcgcgctctccggctatatccagcgcctggatggaacctggctggcattttcgatcctggtcaacaactacggcggccgcagtgtcgccgaagtgcgcggcgtcatggaccgcatttgtaatctgatattggaatga

SEQ ID NO: 694 - protein, 502 aa, Solibacter usitatus Ellin6076
MTAKQRAAVATFLLAALASQCAAAGLPEAIQKLIDSSPAARTAFWGIQIVDLASGKTLYELNPDHYFVPASNAKLFSTALALTRLGPDYTFQTRVFADAPPDSQGRISGDLRLIGGGDPNLSARAIPYRMGPPTGNPLAAIEDLADQLAARGIRIVSGDIVGDDTWYVWQPYAVGWAIDDPQSDDGPPISALTLSDNALNLSVHPGAAVGEVAELAFSPPLEFYRIENRVRTVAAGGERRVHFHRIPGSRDAVLWGTIPLRDRGQDMLTSVEDPAEFAAEALRNALEARGITVEGAARSQHLFPNQLADLTQAPPSEAVGGVELANRSSARLVEDLRVTAKVSQNLHAELLLRAVGRARRNVGSFEAGMTEMKIFLADAGVEPTGYNLLDGSGLSRLDLVTPATVVRLLRFMYDSPARDNWLSIFPIGGQDGTLSTRFGGTPAAGRVLAKTGSLSHVSALSGYIQRLDGTWLAFSILVNNYGGRSVAEVRGVMDRICNLILE

SEQ ID NO: 695 - DNA, 1542 bp, Shewanella sp. ANA-3
  CDS (1)..(1542): transl_table=11
atgacgtactcgctaaacaaggataagttacaggcatcattcactcgccccaagattaaagggttactcttaggtagcttggtaagcatgctactgtcaacccaagcccatgcggcaattcatccgatggatgagtcgatattggccaagcaaatcgccgatattgctccgcgtcattcgcaagtggctttgttggcccgtgatttaagtaccaataccctgttatacagccagcaagccgataccttatttatccccgccagcacacaaaaagtgctgaccgccgttaccgctttggccacccttggcccagattttcgctatgtcactgagctgtggagtgatgcgcctattcgccaaggtcatattgcgggcagtgtttatctgcgttttagcggcgatccgacgctaactcaggacgaccttaaggccttgtttgctcatctacaaaagcaaggcataacaagcattgaggggcatctctatcttatcggggataaacaagagcaattacaagcgcctggctgggtgtgggatgatctcgggatttgctttgcagcgccggtgtcgagttatatcatcaaccaaaactgcgtgtacgggcagtttgcgccaagctcagccaagcatgcttctgaggtgaaattaagggcatcgagttttggggtgaaagtgagtagcgacgccatattctcccccaaagcaggccatgatttttgccaactcgatttagtacgccttggccagaatcagtatcatctacggggctgctatcctggcaatgaagcgataccgctggcgattgccattagcgatcctgaaaaatttgccatggacaccctaacagcgacgctcaagggtgaaatgtcactctcaggtaaagtgaagataggcaacgccatcccttcgaaggcaaaactcattgccagccatagcagcgcacccttgcctgaactgctcaaaaccatgttgctgaagtcggataacctgattgccgatagtttgtttaagcgcgtggggcaaagttattacaaagcccaaggcagctttacccatggtgcagcggctatgcgccatatactgactgagcttgggattgatttaaccaacgccaatattgtcgatggttcagggctttctcgctataacctgttgagcgcaaaacaattagccgatgtactggcactcatttaccaagatgcacgctttcacagcctcattgacagtttgcccgaagctggtgtcagcggcacactgcaatatcgcttgggatacactaaaccgcccttaaaacatcgagtgtttgccaagactggctcgatgcagggtgtcgccaatttagctggctttatgcgtttagcgcagcagcgggatattctctttgtcgtgctcgagaatggcatcagtcctgaaaccaaaaaacaacgtaagcccgcctttagcgctgactttttaactcggctactgagcgctgtcgaaactcaaactcagaccagccaaacaacgaccactgagctcaacaccgttaagttaagtgattaa

SEQ ID NO: 696 - protein, 513 aa, Shewanella sp. ANA-3
MTYSLNKDKLQASFTRPKIKGLLLGSLVSMLLSTQAHAAIHPMDESILAKQIADIAPRHSQVALLARDLSTNTLLYSQQADTLFIPASTQKVLTAVTALATLGPDFRYVTELWSDAPIRQGHIAGSVYLRFSGDPTLTQDDLKALFAHLQKQGITSIEGHLYLIGDKQEQLQAPGWVWDDLGICFAAPVSSYIINQNCVYGQFAPSSAKHASEVKLRASSFGVKVSSDAIFSPKAGHDFCQLDLVRLGQNQYHLRGCYPGNEAIPLAIAISDPEKFAMDTLTATLKGEMSLSGKVKIGNAIPSKAKLIASHSSAPLPELLKTMLLKSDNLIADSLFKRVGQSYYKAQGSFTHGAAAMRHILTELGIDLTNANIVDGSGLSRYNLLSAKQLADVLALIYQDARFHSLIDSLPEAGVSGTLQYRLGYTKPPLKHRVFAKTGSMQGVANLAGFMRLAQQRDILFVVLENGISPETKKQRKPAFSADFLTRLLSAVETQTQTSQTTTTELNTVKLSD

SEQ ID NO: 697 - DNA, 1467 bp, Azoarcus sp. BH72
  CDS (1)..(1467): transl_table=11
atgaagcgcggattctaccgggcacagcccgcagcgggcgccggcgttgcgcggcgccctgcccccgctggcctgctgcgcgggctcgccgtgctgcttgtggccgcggccgcgcaaccggctttcgccgagctgccgcccgccgtcgccgctgcgctcgacacggcacgcatccccgccgaagccgtcagtgcctgggtgcagccggtggatggcagcccgcccgccctcgcgcacaatgccgcgcgcccgatgaacccggcctccacgatgaagctggtgaccgcgtttgcggcgttctcgcagctcggccccgcctacacctggcacacccgcgtcgcacgcgccggggaagtgcgcaacggccgcctcgagggtgagcttttcctgatcggcggcgccgatccgatgctcgacgaggaccgggttcgccgcctgctgcgcaaggtgcgcggacttggcgtccagcacatcgccggcggcatcgtgctcgatgcgtcggcgttggcgctgccgccgcacgacccggcactgttcgacggccgcccgctgcgcccctacaacagcggcccctacggcctgctgatgcattacaacaccctgcagctcgcgctgtttcccgccgaagccggcggcccggtcaccgtggtggcggagccgccgctggcgggcctcgcgctcgagaaccggctggtgggcggcagcggcgcctgcgaaccatggcagcgcggcctggaggcggcgctctcgccggcaggcggcctcattctgtccggttcgctgccggtggcatgcggtgtccgtaactggagcgccgcgccgctggcgccatccgcctatgcggcggcactggtcggtgcagtgtggggagaactgggtggcaccgccggcaacgcggtgcgcgaggcggtcacgccgggcagcgcgacgatcctgctcgacgaggaatcgcggccgctggccgacgtgatacgcgacatgaacaagtggtccagcaacgtcatcgcgcgccagctcctcgccacgctcggcatgaaccagccgggggacgcggttcaggccggcgcggccgcggcccagcgcgcgctcgcggcggccggcatcgacaccagcggcctggtgatcgaaaacggcgccggtctgtcccgcctggaacgcgtgcgcgccgacaccctggccgcaacgctgctggccgcgtggcaacggccctggatgcccgagtacatcgccgcgctgccggtggcgggcgtggatggcaccgcgcgccgccgcctcaacggcagccccgccaacggctacgcccacctcaagaccggcacgctggaaggcgtgcgcgcaatggcgggctatgtgaccgacgcccgcgggcagcgtcacatcgtcgtcatgatggtgaatcacccccaggcagcggccagcgcggcggcgcaggatgccttggtggagtgggtgtgggccggacgctga

SEQ ID NO: 698 - protein, 488 aa, Azoarcus sp. BH72
MKRGFYRAQPAAGAGVARRPAPAGLLRGLAVLLVAAAAQPAFAELPPAVAAALDTARIPAEAVSAWVQPVDGSPPALAHNAARPMNPASTMKLVTAFAAFSQLGPAYTWHTRVARAGEVRNGRLEGELFLIGGADPMLDEDRVRRLLRKVRGLGVQHIAGGIVLDASALALPPHDPALFDGRPLRPYNSGPYGLLMHYNTLQLALFPAEAGGPVTVVAEPPLAGLALENRLVGGSGACEPWQRGLEAALSPAGGLILSGSLPVACGVRNWSAAPLAPSAYAAALVGAVWGELGGTAGNAVREAVTPGSATILLDEESRPLADVIRDMNKWSSNVIARQLLATLGMNQPGDAVQAGAAAAQRALAAAGIDTSGLVIENGAGLSRLERVRADTLAATLLAAWQRPWMPEYIAALPVAGVDGTARRRLNGSPANGYAHLKTGTLEGVRAMAGYVTDARGQRHIVVMMVNHPQAAASAAAQDALVEWVWAGR

SEQ ID NO: 699 - DNA, 1464 bp, Nostoc punctiforme PCC 73102
  CDS (1)..(1464): transl_table=11
atgactagaaaaatttctcttggcttgatgctgctgtttttgggtactcatattggtgttacccaaacagtagctaaagcacaaaccccagttgcaccaacaactaccacaaaatcaatttgctctacccaactgggaacagctatagatgctgtaatcaatcgtcctttatttagtcgagtgcgctggggaattttggtgcaacccctgtcaacagggtcaactctttatagtcgggatgctcagaaatattttattcccgcctctaacctcaaattgctgacaacagcagctgcattgcagcaattgggtgctaattttcggattcgcacctctatttatcagaatggcaacggtgttttacgtgttgtcggtaggggagatcccagcttaagtgatactcaactgcaaacattagcacagcagctaaaacagaaaggtattactcaaattcagaggttgatagctgatgatagttatattcaaggagacattgttaaccccacctggcaatgggaagatgtgcagtcagactatggcgcaccagtcagcagctttattctaaatcaaaatatttttagcttaaaacttgtaccgcaggctgtaggtaaatccttacaactggtgtggattgatcctggcgaggcgaaacagtggcggacaattaatcagtcaataacggttgcccaaaatcaaccaacttacgtcaatattacccgcgaattatcaggaacagtattacgaattcaaggacaactaacaacaaattctgaaccgtctttaatagatttgcctgtaattgaccctaattattacttcttacgacgcttccgtgctgctttggcagcagaaaaaattcctttggggcaaacattagtggtaactggtggtcttaatcaagaggaaatagcttttgtagagtcaccacctctatctgaattattaatggaaactcttcagaatagtaataatctttatgctgaggcactattgagagcattagctggcgaaaaacctagagtgaaaactaaaactagcgttgatgttggtttagaagctgtcaaagcgagtttaactcaattgggagttgatccagcaaattatattttagtagatggttcgggtttatcacgtcgaaacttagcgacaccagaagcttttgtacaaactttgcgaggaatggcaagaacaccagcaggatatgtgtatcgcgcatctttacccgtagcgggtaaaattggaaccttaaaagggcgctttcaaaacacatctgctgagggcattgtgcaagcaaagacaggtacgttaacgggtgtagtctctctctctggatatataaatgtgcctaaatatgagccgttagtttttagtattattgtgaatcaatcggagcaacctgcaacaattgtgcggcaggctattgatgaaattgttgttttgttaacgcagttacaacgttgttaa

SEQ ID NO: 700 - protein, 487 aa, Nostoc punctiforme PCC 73102
MTRKISLGLMLLFLGTHIGVTQTVAKAQTPVAPTTTTKSICSTQLGTAIDAVINRPLFSRVRWGILVQPLSTGSTLYSRDAQKYFIPASNLKLLTTAAALQQLGANFRIRTSIYQNGNGVLRVVGRGDPSLSDTQLQTLAQQLKQKGITQIQRLIADDSYIQGDIVNPTWQWEDVQSDYGAPVSSFILNQNIFSLKLVPQAVGKSLQLVWIDPGEAKQWRTINQSITVAQNQPTYVNITRELSGTVLRIQGQLTTNSEPSLIDLPVIDPNYYFLRRFRAALAAEKIPLGQTLVVTGGLNQEEIAFVESPPLSELLMETLQNSNNLYAEALLRALAGEKPRVKTKTSVDVGLEAVKASLTQLGVDPANYILVDGSGLSRRNLATPEAFVQTLRGMARTPAGYVYRASLPVAGKIGTLKGRFQNTSAEGIVQAKTGTLTGVVSLSGYINVPKYEPLVFSIIVNQSEQPATIVRQAIDEIVVLLTQLQRC

SEQ ID NO: 701 - DNA, 1443 bp, Actinobacillus pleuropneumoniae serovar 1 str. 4074
  CDS (1)..(1443): transl_table=11
atgttgttaaaatccgttcgctcatacattcaaaatcttttactgacgagtatctttattccgagtatttcttttgccgaaataaatacctcggagcttctcaccaatttaccggcaggtgcctccgccagttttattgcgaaaaacctcgaaaccaatcaaattattacacaatatcaaagtgatgtttttatgttgccggcaagtacacaaaaagtatttaccgcacttgccgccaaattggttttatcgaatgattttcgctttcaaacggctttattaacgaacgggaaagtggaaaacggaataataaaaggtgatttaatcgccaaattcacaggtgatccggatctcactagcggtcagctttatcagcttatcgggcaattaaaaaaacaaggtattgaaaaaatagaaggcaatctcattttagatacctccgtttttgccagtcatgataaagcggcgggttggatttggaatgatttaactatgtgctttaacgctccgcctgccgccgtcaatgtggataacaactgcttttatgtcaatttagacaccaatcaaaaagtcggtgattttgcaaaagttaatgttcccgccgcctatccggtacaagtatttagctcggcttatatcgtcgataaagcggaagctccttattgccagttggatgtcgtagttaatgacaacaaccgctatcaaatcaaaggctgtatggctcgccaagcggaaccgttcggattgagtttttccgtacaagatcccgctacttacggtgcaaatttgattaaagcgaatttaaagcgcctaggcattgcttttgaagggaaaattcaagaaccgcttaatgcgcaaaaaggtactttgttggcggaacattggtctgctccgttaccggatcttttaaagaaaatgatgaaaaaatccgataaccaaattgcggatagtctattcagaaccattgccaatcagcagcataatcgtccggcgtcttttccgttagctagtcacgtattacgcactttattaaaatctaaagcgggcgttacctttggaaatagtattgtcgcagacggttcaggtctttctcgtcataaccaaatcaatgcggaaacgatgttgcaagcccttgaatatattgcaaaaaatgaagcgcaattacagctgtttgaaaccttcccgattgcgggtgtggacggtacgatttccggtaggggctctatctccgtcgaaccgctggcgaaaaatctgattgccaaaaccggttcactgaaaggggtatataatctggcgggctttatgaaaaatgcgcgaggtgaacgtatcgcctttgtacaatttgtaaacggctattcaaccggcgagctggaaagtaaaaccaaacgtgcgccgttagtgaattttgaaaataaattttatatggcgctctttaacgaataa

SEQ ID NO: 702 - protein, 480 aa, Actinobacillus pleuropneumoniae serovar 1 str. 4074
MLLKSVRSYIQNLLLTSIFIPSISFAEINTSELLTNLPAGASASFIAKNLETNQIITQYQSDVFMLPASTQKVFTALAAKLVLSNDFRFQTALLTNGKVENGIIKGDLIAKFTGDPDLTSGQLYQLIGQLKKQGIEKIEGNLILDTSVFASHDKAAGWIWNDLTMCFNAPPAAVNVDNNCFYVNLDTNQKVGDFAKVNVPAAYPVQVFSSAYIVDKAEAPYCQLDVVVNDNNRYQIKGCMARQAEPFGLSFSVQDPATYGANLIKANLKRLGIAFEGKIQEPLNAQKGTLLAEHWSAPLPDLLKKMMKKSDNQIADSLFRTIANQQHNRPASFPLASHVLRTLLKSKAGVTFGNSIVADGSGLSRHNQINAETMLQALEYIAKNEAQLQLFETFPIAGVDGTISGRGSISVEPLAKNLIAKTGSLKGVYNLAGFMKNARGERIAFVQFVNGYSTGELESKTKRAPLVNFENKFYMALFNE

SEQ ID NO: 703 - DNA, 1440 bp, Haemophilus influenzae R2846
  CDS (1)..(1440): transl_table=11
atgaaaaaattatcttcaatttctaccgcacttggttcctttttactttcagtgagttttagccttccaaccttcgccaatattaatgtttcagatttaacacaaaaactgcctgaaggctctaacgtaggtttcatcgccaaaaatataaatcaaaaccaaattattgctgattataatggctcaacctttatgctttctgcaagcacacaaaaagtttttacagccgttgccgctaaacttgcattaggcgatcaattccaatttgagaccgcacttttgagtaatgggaaaattcaaagtgggaatttagatggtcacttaatcgtgcgtttcacaggcgatcctgatctcacaagaggtcagctttatagcttacttgccgaattaaaaaaacaaggcatcaaaaaaattaatggcgatttagtattagatacctctgttttttctagtcacgaccgaggattaggttggatttggaacgatctcacaatgtgtttcaactctccaccagcagctgcaaatattgataacaactgtttttatgcggaactagatgcgaataaaaatccaggtgaaatagtaaaaattaatgtgcctgcacaatttccaattcaagtgttcggacaagtttatgtagcggatagcaatgaagcaccttattgtcagctcgatgttgttgtacacgacaataatcgctatcaagtaaaaggatgtttagcccgtcaatataaaccttttggcttaagttttgccgtgcaaaatacggatgcttatgctgccgcgattattcaacgtcaattaagacaattaggtattgagttcaatggcaaagtcttgttaccccaaaaaccacaacaaggtcagctattagcgaaacatttatcaaaaccattaccagatttattgaaaaaaatgatgaaaaaatccgataaccaaattgccgattcattattccgagcggtggcattcaattactataaacgccccgcctcctttcaattaggcacattagcggttaaatccatattgcaaaaacaaggaattcgttttggtaatagcattttagccgatggttcgggtctatctcgccataatcttgtggcacctaaaacgatgctatccgttttagaatacatcgccaaaaacgaagataaactacatttaatggaaactttccccatcgcaggtgtagatggcacgatcagtgggcgaggtggattaattagcccgccattagtgaaaaacgtgattgctaaaactggttctttgaaaggcgtttataacctagctggctttatgacaaatgcgcgaggggaaaaagtggcatttgtacaatttattaatggctactcaactggcgatttggaaagcaaaacaaaacgtgccccattagtacaattcgagcgtaatttatataacgaactctataaatattaa

SEQ ID NO: 704 - protein, 479 aa, Haemophilus influenzae R2846
MKKLSSISTALGSFLLSVSFSLPTFANINVSDLTQKLPEGSNVGFIAKNINQNQIIADYNGSTFMLSASTQKVFTAVAAKLALGDQFQFETALLSNGKIQSGNLDGHLIVRFTGDPDLTRGQLYSLLAELKKQGIKKINGDLVLDTSVFSSHDRGLGWIWNDLTMCFNSPPAAANIDNNCFYAELDANKNPGEIVKINVPAQFPIQVFGQVYVADSNEAPYCQLDVVVHDNNRYQVKGCLARQYKPFGLSFAVQNTDAYAAAIIQRQLRQLGIEFNGKVLLPQKPQQGQLLAKHLSKPLPDLLKKMMKKSDNQIADSLFRAVAFNYYKRPASFQLGTLAVKSILQKQGIRFGNSILADGSGLSRHNLVAPKTMLSVLEYIAKNEDKLHLMETFPIAGVDGTISGRGGLISPPLVKNVIAKTGSLKGVYNLAGFMTNARGEKVAFVQFINGYSTGDLESKTKRAPLVQFERNLYNELYKY

SEQ ID NO: 705 - DNA, 1440 bp, Haemophilus influenzae R2866
  CDS (1)..(1440): transl_table=11
atgaaaaaattatcttcaatttccaccgcacttggttcctttttactttcagtgagttttagcctaccaactttcgccaatattaatgtttcagatttaacacaaaaactgcctgaaggctctaacgcaggtgttattgctaaaaatatcaatcaaaatcaaataattgctaattataatggctcaacctttatgcttcctgcaagcacacaaaaagtttttacagccgttgccgctaaacttgcattaggcgatcaattccaatttgagaccgcacttttgagtaatgggaaaattcaaaatgggaatttagatggcaacttaatcgtgcgtttcacaggcgatcctgatctcacaagaggtcagctttatagcttacttgcagaattaaaaaaacaaggcatcaaaaaaattaatggcgatttagtattagatacctctgttttttctagtcacgaccgaggattaggttggatttggaacgatctcacaatgtgtttcaactctccaccagcagctgcaaatattgataacaactgtttctatgcggaactagatgcgaataaaaatccaggtgaaatagtaaaaattaatgtgcctgcacaatttcctattcaagtgttcggacaagtttatgtagcggatagcaatgaagcgccttattgtcagctcgatgttgttgtacacgacaataatcgctatcaagtaaaaggatgtttagcccgtcaatataaaccttttggcttaagttttgccgtgcaaaatacggatgcttatgctgccgcgattattcaacgtcaattaagacaattaggtattgagtttaatggcaaagtcttgttacctcaaaaaccacagcaaggtcagctattagcgaaacatttatccaaaccattaccagatttattgaagaaaatgatgaaaaaatccgataaccaaattgccgattcattattccgagcggtggcattcaattactataaacgccccgcctcctttcaattaggcacattagcggttaaatccatattgcaaaaacaaggaattcgttttggtaatagcattttagccgatggttcgggtctatctcgccataatcttgtggcacctaaaacaatgctatccgttttagaatacatcgccaaaaacgaagataaactacatttaatggaaactttccccatcgcaggtgtagatggcacgatcagtgggcgaggtggattaattagcccgccattagtgaaaaacgtgattgctaaaactggttctttgaaaggcgtttataacctagctggctttatgacaaatgcgcgaggggaaaaagtggcatttgtacaatttattaatggctactcaactggtgatttggaaagcaaaacaaaacgtgccccattagtacaattcgagcgtaatttatataacgaactctataaatattaa

SEQ ID NO: 706 - protein, 479 aa, Haemophilus influenzae R2866
MKKLSSISTALGSFLLSVSFSLPTFANINVSDLTQKLPEGSNAGVIAKNINQNQIIANYNGSTFMLPASTQKVFTAVAAKLALGDQFQFETALLSNGKIQNGNLDGNLIVRFTGDPDLTRGQLYSLLAELKKQGIKKINGDLVLDTSVFSSHDRGLGWIWNDLTMCFNSPPAAANIDNNCFYAELDANKNPGEIVKINVPAQFPIQVFGQVYVADSNEAPYCQLDVVVHDNNRYQVKGCLARQYKPFGLSFAVQNTDAYAAAIIQRQLRQLGIEFNGKVLLPQKPQQGQLLAKHLSKPLPDLLKKMMKKSDNQIADSLFRAVAFNYYKRPASFQLGTLAVKSILQKQGIRFGNSILADGSGLSRHNLVAPKTMLSVLEYIAKNEDKLHLMETFPIAGVDGTISGRGGLISPPLVKNVIAKTGSLKGVYNLAGFMTNARGEKVAFVQFINGYSTGDLESKTKRAPLVQFERNLYNELYKY

SEQ ID NO: 707 - DNA, 1695 bp, Burkholderia vietnamiensis G4
  CDS (1)..(1695): transl_table=11
atggcgaccattgtagcgccgcggctcgcttgcgccgtctgcaatgcaacagtaaggcgacacgcgtgtggcgcatgcgcacttgtctctacaatgtgcgctccggcgccgcgcgcccccgctcgaagcctcgtgtctttcccgtattcgcccatgccgatttccgctctgtccgcccggttcgtcagccgcacccgtctgtgtgcgcgcacggccgccgtcgtcgccgcctgcaccgcgcttgcgttcgcgccgcccgcgcatgcccgcaagaaactccacaaggacgcacgcaagaccgtcgtcgtgtcgcccgccgcgcgcgcggccggcctgccggcatccgtgctggtcgcgctgcagcgcgcgaacgtgccggcatccgcgatcagcgtcgtcgtcgagcgcgtcggcgaccccgagccgctgatcgcgtggaacggcagccggccgatgctgccggcgtcgacgatgaagctggtcacgacgttctccggcctgtcgatcctcggccccgactaccgctggcgcaccaccgcgtacgcggacggtccgatcgacccggacggcacgctgcagggcaacctgtacatcaagggcaccggcgacccgaagctcgtgcccgaagagctgatcgacctcgtcgacaagatccgcaaggccggcgtgcggcgcgtggccggccgcctcgtgctcgacaagagctatttcgcggcgtcgacgcgcgacctgccgtcgttcgacgacgacgtgagcgcgccgtacaacgtcggccccgatccgctgctgtacgcgttcaaggccgtgtcgttcacggtcacgccgggcgacgacggcaaggtggccgtcgacgtgctgccgccgctcgcgaacctgtcgatcgacaaccagctcgtcgagggcggcggatcgtgcggcgcggcggccgcggccgcacgcccgacgctgtcgggcgcgggcacggcgggcgggatcatgaccgcgtcgttctccggcgactatccgctgcgctgcggcgcgcacacgaccaatctcgcgatcctcgaccacacggcgttcttcgcgcgcggcttcctcgcgctgtggcagcaggacggcggcacgatcgcgggcccggtcgacgaaggcaaggtgccgaacaccgcgcggccgctcgccgtgcaccacagccccgtgctcggcagcatcgtgtacgacatcaacaagttcagcaacaacgtgatggcgcgcaacctgttcctcacgatcggcgcggtggccggcaagccgcccgcgacgcccgagcagtcgagccgtgcgattcacgcgttcctgcagaggagcggaatcgcgatgcccgagctggaactggagaacggctcggggctgtcgcgcgacgagcacgtgagcgcgctgtcgctcgccgcgctgctgcaggccgcgaacgcgagcccggtcgcgcagacgttcatcgattcgctgccgatcgccggcatcgacggcacgatgaagaaccggctcaccaacgcgggcgtactcggcaatgcccacatcaagaccggcacgctgcgcgacgtgcgcgcgattgccggctacgtcgcgggcgccgacggacagagctacgtcgtcgtgagcttcatcaacgacgagcacgcggaagccgcgcgcgccgcgcacgatacgctgctcgaatggatctatgcgggcgcgcattga

SEQ ID NO: 708 - protein, 564 aa, Burkholderia vietnamiensis G4
MATIVAPRLACAVCNATVRRHACGACALVSTMCAPAPRAPARSLVSFPYSPMPISALSARFVSRTRLCARTAAVVAACTALAFAPPAHARKKLHKDARKTVVVSPAARAAGLPASVLVALQRANVPASAISVVVERVGDPEPLIAWNGSRPMLPASTMKLVTTFSGLSILGPDYRWRTTAYADGPIDPDGTLQGNLYIKGTGDPKLVPEELIDLVDKIRKAGVRRVAGRLVLDKSYFAASTRDLPSFDDDVSAPYNVGPDPLLYAFKAVSFTVTPGDDGKVAVDVLPPLANLSIDNQLVEGGGSCGAAAAAARPTLSGAGTAGGIMTASFSGDYPLRCGAHTTNLAILDHTAFFARGFLALWQQDGGTIAGPVDEGKVPNTARPLAVHHSPVLGSIVYDINKFSNNVMARNLFLTIGAVAGKPPATPEQSSRAIHAFLQRSGIAMPELELENGSGLSRDEHVSALSLAALLQAANASPVAQTFIDSLPIAGIDGTMKNRLTNAGVLGNAHIKTGTLRDVRAIAGYVAGADGQSYVVVSFINDEHAEAARAAHDTLLEWIYAGAH

SEQ ID NO: 709 - DNA, 1404 bp, Photobacterium sp. SKA34
  CDS (1)..(1404): transl_table=11
atgtttaaaaaactgttttgctctgcattaattgcaacgagcttttcttctttcgctgcattctcacctcagcaagctatcgaacacctccccaaagggagtgatgttgcttttctagttgtaaaccctgcaacaaataaaattatttacagtaaacgtgctgatgaattgcaagcccccgcaagtactcaaaaaatgatcaccgcccttgctgcaaagctatatctcggtaataactttcgctttgatacttaccttgagactaaaggcaatgatgtcatcatgaactttaatggcgacccaacacttaaacgcagtgatattgcaaatttacttcgccagttaaaacagcaaggcataacgacgattaaaggtaatttgtacttaaatggtggacactttactggctatgaacgtgctattggttggccgtgggatattttaggctcttgttacagtgcaccatcaagtagtatcagcttggagcataactgtgttcaaggagcactgtatagtaataagccttttggggaagtcactcgcgtaaatgtacctagccaccaaccaatccaagctgaaacctctgcgattgtggtatctaaagcacagcagaaagaacagcactgtcagctttcaatgaactccaatgatcgtaacatgtaccaaattagtggctgtatccaacctcgaaaagagcctctaccactaaagtttgcagttcaaaatacaaccttatattcgaccgcagttattcaacaagagcttaagcgcgcagggataaaattaaacggtaaggtacttcgtaacgataaaatcagcggtaaaatcattgcaacgcatcgctcagctccattatcaactctgctagatattatactgaagcgctctgataacttatttgccgataacattgccaaaaccattggtgcaaagtattacaaccaagcaggtagttacaccaatggcattgaagcgatcaaagcgatactaaaagataaagccggtatcgatctttctgatactgtgatggtggatggttcaggcttatcgcgtaataaccgtttaactgcaagtgatttaataaaagtagtgacttacatttataaccaccctcaattaggtttaatgaacgatctaccagtctcaggtaaaagtggcacgttacagtatcgtcgcagtattcgtgatgttccgttaaaaggtaagattattgctaaaagtggctctttattcggaacctataaccttgcaggtgtgattaagacccacaacggtaaaccacttctctttgtacagttagtgactaattactatccacacatgcatgatggtgaaaaagcagtattaccgcctatttaccaatttgaaaagcagctttataactcactgtataaaagctactaa

SEQ ID NO: 710 - protein, 467 aa, Photobacterium sp. SKA34
MFKKLFCSALIATSFSSFAAFSPQQAIEHLPKGSDVAFLVVNPATNKIIYSKRADELQAPASTQKMITALAAKLYLGNNFRFDTYLETKGNDVIMNFNGDPTLKRSDIANLLRQLKQQGITTIKGNLYLNGGHFTGYERAIGWPWDILGSCYSAPSSSISLEHNCVQGALYSNKPFGEVTRVNVPSHQPIQAETSAIVVSKAQQKEQHCQLSMNSNDRNMYQISGCIQPRKEPLPLKFAVQNTTLYSTAVIQQELKRAGIKLNGKVLRNDKISGKIIATHRSAPLSTLLDIILKRSDNLFADNIAKTIGAKYYNQAGSYTNGIEAIKAILKDKAGIDLSDTVMVDGSGLSRNNRLTASDLIKVVTYIYNHPQLGLMNDLPVSGKSGTLQYRRSIRDVPLKGKIIAKSGSLFGTYNLAGVIKTHNGKPLLFVQLVTNYYPHMHDGEKAVLPPIYQFEKQLYNSLYKSY

SEQ ID NO: 711 - DNA, 1404 bp, Rickettsiella grylli
  CDS (1)..(1404): transl_table=11
ttggcgtattataacaacgactatactcaagaaccgtcatcttctattcaacaaaatatcaatcagatattaagccattttaaaggctttaatacgggcatttctattcaatctttatcaacgggaaaaataatctatcaatataatgccaatcgtcgttttattcctgcaagtactttaaaattatttactggaattgctgcattagagtatttagggcctcatttccaatttaaaacccgctttttaaccaattctggatcaatcgttcgtcatggaactttaatggggaatttatatataaaatttagtggcgatccttatttaacgctgaatgatctgaaagacatgctggaaacattaaatgagcaacatatcaataaagttcagggaaatatcattatcgatgacacggtcatcgatcgaagcacctggcctccaggacgtgtcattgacgatagaattttttgctatgccgcgcccgtaacagcaactatcatcaatcgaaattgttttaatttgagtattaagccaactcaaaatctattacatccgaccgttacaaaaagtagtcgtcatttagggattgttattgataatcaagccgttacaaaacgcttaaaacaagcccgttattccctcgatttaaaaccgaatgcggttagcaaaaatcattatacgctaacagggtatctttcacgcaaaatgggccccttatcgtttgccgttgcactgcaaaatccaaatttagcaacttatgacattgtggcgggattattaaaaaaatattctattcgatattcaagtttaatctttggaaaaacccctccctttgccaaaacattagctgaaaacagctctcccgaacttgcttttttaataaaaaatatgttaaaaaagtccgataatcttatcgcggatagtttattaaagaaattaggagaaaaatatttttcagtgcaaggaagttggaagtcggggagaaacgctgttcaggctatccttgccaacaaaacaaacattaacttcaaacagcttgtaatggtcgatggctctggtttatcgcgcgctaatagtatcacgcctaatgcttttgttaaattattaaattttgcttacacgcaattacccgatagcgacttattttttgaatctttaccccgctcagggattgatgggacattaaaacatcgcttaggcggtgcttcattaggtaaaatacatgctaaaacaggcagcatgcacggaatcagtagtttagcgggctatattcaaactgcaaaccatcacattcttgctttttctattttaattaatgaccctgttcctggaaaaaataatcaggggggttaccgtttattagaaaatcgaatttgtgaatttttagcgaaaagtgatgtttaa

SEQ ID NO: 712 - protein, 467 aa, Rickettsiella grylli
MAYYNNDYTQEPSSSIQQNINQILSHFKGFNTGISIQSLSTGKIIYQYNANRRFIPASTLKLFTGIAALEYLGPHFQFKTRFLTNSGSIVRHGTLMGNLYIKFSGDPYLTLNDLKDMLETLNEQHINKVQGNIIIDDTVIDRSTWPPGRVIDDRIFCYAAPVTATIINRNCFNLSIKPTQNLLHPTVTKSSRHLGIVIDNQAVTKRLKQARYSLDLKPNAVSKNHYTLTGYLSRKMGPLSFAVALQNPNLATYDIVAGLLKKYSIRYSSLIFGKTPPFAKTLAENSSPELAFLIKNMLKKSDNLIADSLLKKLGEKYFSVQGSWKSGRNAVQAILANKTNINFKQLVMVDGSGLSRANSITPNAFVKLLNFAYTQLPDSDLFFESLPRSGIDGTLKHRLGGASLGKIHAKTGSMHGISSLAGYIQTANHHILAFSILINDPVPGKNNQGGYRLLENRICEFLAKSDV

SEQ ID NO: 713 - DNA, 1440 bp, Haemophilus influenzae
  CDS (1)..(1440): transl_table=11
atgaaaaaattatcttcaatttccaccgcacttggttcctttttactttcagtgagttttagccttccaaccttcgccaatattaatgtttcagatttaacacaaaaactgcctgaaggctctaacgtaggtttcatcgccaaaaatataaatcaaaaccaaattattgctgattataatggctcaacctttatgctttctgcaagcacacaaaaagtttttacagccgttgccgctaaacttgcattagacgatcaattccaatttgagaccgcacttttgagtaatgggaaaattcaaaatgggaatttagatggcaacttaatcgtgcgtttcacaggcgatcctgatctcacaagaggtcagctttatagcttacttgccgaattaaaaaaacaaggcatcaaaaaaattaatggcgatttagtattagatacctctgttttttctagtcacgaccgaggattaggttggatttggaacgatctcacaatgtgtttcaactctccaccagcagctgcaaatattgataacaactgtttttatgcggaactagatgcgaataaaaatccaggtgaaatagtaaaaattaatgtgcctgcacaatttcctattcaagtgttcggacaagtttatgtagcggatagcaatgaagcgccttattgtcagctcgatgttgttgtacacgacaataatcgctatcaagtaaaaggatgtttagcccgtcaatataaaccttttggcttaagttttgccgtgcaaaatacggatgcttatgctgctgagattattcaacgtcaattaagacaattaggtattgagttcaatggcaaagtcttgttaccccaaaaaccacaacaaggtcagctattagcgaaacatttatcaaaaccattaccagatttattgaaaaaaatgatgaaaaaatccgataaccaaattgccgattcattattccgagcggtggcattcaattactataaacgccccgcctcctttcaattaggcacattagcggttaaatccatattgcaaaaacaaggaattcgttttggtaatagcattttagccgatggttcgggtctatctcgccataatcttgtggcacctaaaacgatgctatccgttttagaatacatcgccaaaaacgaagataaactacatttaatggaaactttccccatcgcaggtgtagatggcacgatcagtgggcgaggtggattaattagcccgccattagtgaaaaacgtgattgctaaaactggttctttgaaaggcgtttataacctagctggctttatgacaaatgcgcgaggggaaaaagtggcatttgtacaatttattaatggctactcaactggcgatttagaaagcaaaacaaaacgtgccccattagtacaattcgagcgtaatttatataacgaactctataaatattaa

SEQ ID NO: 714 - protein, 479 aa, Haemophilus influenzae
MKKLSSISTALGSFLLSVSFSLPTFANINVSDLTQKLPEGSNVGFIAKNINQNQIIADYNGSTFMLSASTQKVFTAVAAKLALDDQFQFETALLSNGKIQNGNLDGNLIVRFTGDPDLTRGQLYSLLAELKKQGIKKINGDLVLDTSVFSSHDRGLGWIWNDLTMCFNSPPAAANIDNNCFYAELDANKNPGEIVKINVPAQFPIQVFGQVYVADSNEAPYCQLDVVVHDNNRYQVKGCLARQYKPFGLSFAVQNTDAYAAEIIQRQLRQLGIEFNGKVLLPQKPQQGQLLAKHLSKPLPDLLKKMMKKSDNQIADSLFRAVAFNYYKRPASFQLGTLAVKSILQKQGIRFGNSILADGSGLSRHNLVAPKTMLSVLEYIAKNEDKLHLMETFPIAGVDGTISGRGGLISPPLVKNVIAKTGSLKGVYNLAGFMTNARGEKVAFVQFINGYSTGDLESKTKRAPLVQFERNLYNELYKY

SEQ ID NO: 715 - DNA, 1476 bp, Bacillus subtilis
  CDS (1)..(1476): transl_table=11
atgaaaaaaagcataaagctttatgttgctgttttactgcttttcgtcgttgcttcggtgccttatatgcatcaggctgcgcttgccgctgaaaaacaagatgcactttccgggcagatcgataagattttagctgatcatcctgccctcgaaggcgcaatggccggcatcaccgttcgctctgcggaaacaggtgctgttctatatgaacattcaggagacacccgaatgaggcctgcctcttctctaaagcttttgacagcggccgcggcactttctgtccttggcgagaactattcttttacaaccgaggtccggacggatggaacactgaaagggaaaaagctgaatggtaacctttatttgaaagggaaaggcgatccgacacttttaccatctgattttgacaaaatggctgagatattgaaacattccggcgtaaaagtaattaaaggcaatctgatcggtgatgatacgtggcatgatgacatgcgattatcacctgatatgccttggagcgatgaatacacatattatggcgcgccaatctccgctctaacagcgtctccaaacgaagactatgatgcaggcactgtgattgttgaggtcaccccaaatcaaaaagaaggggaagagcctgccgtgtctgtctctccgaaaaccgattatataacgataaagaacgatgctaaaacgactgctgccggttcagagaaagacctcacaatcgaaagagagcatggaacaaacacgattacaattgaagggagcgtaccggttgacgcaaacaagacaaaggaatggatttctgtctgggagcctgccggatatgccttagatttatttaagcagtcactaaaaaaacaaggtattactgtgaaaggggacatcaagacgggtgaagcacctagttcttcagatgtgctgctctctcatcgctcaatgcctttatcgaaactttttgtgccgttcatgaaattaagtaataacggacatgccgaagtgctcgtaaaagagatggggaaagtgaaaaaaggagaagggagctgggaaaaggggctcgaagtgttaaacagtacgcttccggaatttggtgttgattctaaatcactcgtcttaagggacggatcaggaatctcacatattgatgctgtatcctcagatcaactttcacagctgttatatgacattcaggatcagagttggttctcggcttatctaaattctttacctgttgcggggaatcctgacagaatggtgggcggaacgctgagaaaccgcatgaaaggcactcctgcacaaggaaaagtaagagcaaaaaccggatcgctcagtacggtaagctctctatcggggtacgcagaaacaaagagcggaaaaaaacttgttttctctattcttctaaatggattgattgatgaagaggatggaaaagatattgaggatcaaatcgctgtcattttggcaaatcaataa

SEQ ID NO: 716 - protein, 491 aa, Bacillus subtilis [sequence omitted]

SEQ ID NO: 717 - DNA, 25 bp, Artificial sequence
  primer
atgcgattttccagatttatcatcg

SEQ ID NO: 718 - DNA, 28 bp, Artificial sequence
  primer
ttaattgttctgataaatatctttatac

SEQ ID NO: 719 - protein, 436 aa, Artificial sequence
  consensus sequence
  Variant (4)..(5): Xaa in position 4 to 5 is any amino acid
  Variant (7)..(8): Xaa in position 7 to 8 is any amino acid
  Variant (10)..(11): Xaa in position 10 to 11 is any amino acid
  Variant (14)..(16): Xaa in position 14 to 16 is any amino acid
  Variant (19)..(24): Xaa in position 19 to 24 is any amino acid
  Variant (26)..(39): Xaa in position 26 to 39 is any amino acid
  Variant (40)..(50): Xaa in position 40 to 50 is any or no amino acid
  Variant (54)..(54): Xaa in position 54 is any amino acid
  Variant (56)..(62): Xaa in position 56 to 62 is any amino acid
  Variant (63)..(78): Xaa in position 63 to 78 is any or no amino acid
  Variant (80)..(86): Xaa in position 80 to 86 is any amino acid
  Variant (88)..(92): Xaa in position 88 to 92 is any amino acid
  Variant (94)..(97): Xaa in position 94 to 97 is any amino acid
  Variant (99)..(188): Xaa in position 99 to 188 is any amino acid
  Variant (189)..(196): Xaa in position 189 to 196 is any or no amino acid
  Variant (198)..(233): Xaa in position 198 to 233 is any amino acid
  Variant (234)..(237): Xaa in position 234 to 237 is any or no amino acid
  Variant (239)..(255): Xaa in position 239 to 255 is any amino acid
  Variant (256)..(257): Xaa in position 256 to 257 is any or no amino acid
  Variant (259)..(260): Xaa in position 259 to 260 is any amino acid
  Variant (261)..(286): Xaa in position 261 to 286 is any or no amino acid
  Variant (288)..(295): Xaa in position 288 to 295 is any amino acid
  Variant (297)..(297): Xaa in position 297 is any amino acid
  Variant (299)..(299): Xaa in position 299 is any amino acid
  Variant (301)..(302): Xaa in position 301 to 302 is any amino acid
  Variant (304)..(305): Xaa in position 304 to 305 is any amino acid
  Variant (307)..(329): Xaa in position 307 to 329 is any amino acid
  Variant (330)..(333): Xaa in position 330 to 333 is any or no amino acid
  Variant (335)..(347): Xaa in position 335 to 347 is any amino acid
  Variant (348)..(349): Xaa in position 348 to 349 is any or no amino acid
  Variant (356)..(367): Xaa in position 356 to 367 is any amino acid
  Variant (369)..(383): Xaa in position 369 to 383 is any amino acid
  Variant (384)..(385): Xaa in position 384 to 385 is any or no amino acid
  Variant (387)..(388): Xaa in position 387 to 388 is any amino acid
  Variant (390)..(391): Xaa in position 390 to 391 is any amino acid
  Variant (392)..(396): Xaa in position 392 to 396 is any or no amino acid
  Variant (399)..(401): Xaa in position 399 to 401 is any amino acid
  Variant (403)..(412): Xaa in position 403 to 412 is any amino acid
  Variant (413)..(416): Xaa in position 413 to 416 is any or no amino acid
  Variant (420)..(420): Xaa in position 420 is any amino acid
  Variant (422)..(423): Xaa in position 422 to 423 is any amino acid
  Variant (425)..(427): Xaa in position 425 to 427 is any amino acid
  Variant (430)..(435): Xaa in position 430 to 435 is any amino acid
PASXXKXXTXXAAXXXLGXXXXXXTXXXXXXXXXXXXXXXXXXXXXXXXXGDPXLXXXXXXXXXXXXXXXXXXXXXXXLXXXXXXXGXXXXXGXXXXDXXXXXXXXXXXXXXXXXXXXXXXXXXXXXXXXXXXXXXXXXXXXXXXXXXXXXXXXXXXXXXXXXXXXXXXXXXXXXXXXXXXXXXXXXXXXXXXXXXGXXXXXXXXXXXXXXXXXXXXXXXXXXXXXXXXXXXXXXXXGXXXXXXXXXXXXXXXXXXXSXXXXXXXXXXXXXXXXXXXXXXXXXXXXLXXXXXXXXKXSXNXXAXXLXXXXXXXXXXXXXXXXXXXXXXXXXXXLXXXXXXXXXXXXXXXGSGLSRXXXXXXXXXXXXLXXXXXXXXXXXXXXXXXPXXGXXXXXXXGTXXXRXXXXXXXXXXXXXXKTGXLXXVXXXAGXXXXXXG

SEQ ID NO: 720 - protein, 29 aa, Artificial sequence
  protein pattern
  Variant (4)..(4): Xaa in position 4 is Asn, Ser, Thr or Val
  Variant (5)..(5): Xaa in position 5 is any amino acid
  Variant (7)..(7): Xaa in position 7 is Ile, Leu, Met or Val
  Variant (8)..(8): Xaa in position 8 is any amino acid
  Variant (10)..(11): Xaa in position 10 to 11 is any or no amino acid
  Variant (13)..(14): Xaa in position 13 to 14 is any or no amino acid
  Variant (16)..(18): Xaa in position 16 to 18 is any amino acid
  Variant (19)..(19): Xaa in position 19 is Phe, Leu or Val
  Variant (20)..(20): Xaa in position 20 is Glu, Gly or Ser
  Variant (21)..(22): Xaa in position 21 to 22 is any amino acid
  Variant (23)..(23): Xaa in position 23 is Phe, His or Tyr
  Variant (24)..(26): Xaa in position 24 to 26 is any amino acid
  Variant (28)..(28): Xaa in position 28 is any amino acid
  Variant (29)..(29): Xaa in position 29 is Phe, Ile, Leu, Met or Val
PASXXKXXTXXAXXAXXXXXXXXXXXTXX

SEQ ID NO: 721 - protein, 22 aa, Artificial sequence
  protein pattern
  Variant (2)..(2): Xaa in position 2 is Ile, Leu or Val
  Variant (3)..(8): Xaa in position 3 to 8 is any amino acid
  Variant (9)..(9): Xaa in position 9 is Phe, Ile, Leu, Met or Val
  Variant (10)..(10): Xaa in position 10 is any amino acid
  Variant (11)..(11): Xaa in position 11 is Asp or Asn
  Variant (17)..(19): Xaa in position 17 to 19 is any or no amino acid
  Variant (21)..(21): Xaa in position 21 is any amino acid
  Variant (22)..(22): Xaa in position 22 is Asp, Glu, Gly, Asn, Ser or Thr
GXXXXXXXXXXGSGLSXXXRXX

SEQ ID NO: 722 - protein, 33 aa, Artificial sequence
  protein pattern
  Variant (2)..(3): Xaa in position 2 to 3 is any or no amino acid
  Variant (7)..(7): Xaa in position 7 is Ala, Ser or Thr
  Variant (8)..(8): Xaa in position 8 is Ile, Leu or Met
  Variant (9)..(10): Xaa in position 9 to 10 is any amino acid
  Variant (12)..(12): Xaa in position 12 is any amino acid
  Variant (13)..(13): Xaa in position 13 is Ala, Asn or Ser
  Variant (14)..(14): Xaa in position 14 is Ile, Leu, Met or Val
  Variant (15)..(15): Xaa in position 15 is Ala, Ser or Thr
  Variant (17)..(17): Xaa in position 17 is Phe or Tyr
  Variant (18)..(28): Xaa in position 18 to 28 is any amino acid
  Variant (29)..(29): Xaa in position 29 is Ala, Ser, Thr or Val
  Variant (30)..(32): Xaa in position 30 to 32 is any amino acid
  Variant (33)..(33): Xaa in position 33 is Asn or Ser
AXXKTGXXXXVXXXXGXXXXXXXXXXXXXXXXX

SEQ ID NO: 723 - protein, 19 aa, Artificial sequence
  protein pattern
  Variant (2)..(3): Xaa in position 2 to 3 is any or no amino acid
  Variant (5)..(5): Xaa in position 5 is any or no amino acid
  Variant (7)..(8): Xaa in position 7 to 8 is any amino acid
  Variant (9)..(9): Xaa in position 9 is Ala, Ile, Leu or Val
  Variant (10)..(10): Xaa in position 10 is Ile, Leu or Val
  Variant (11)..(16): Xaa in position 11 to 16 is any amino acid
  Variant (18)..(18): Xaa in position 18 is Asp, Asn or Ser
SXXPXLXXXXXXXXXXSXN

SEQ ID NO: 724 - DNA, 378 bp, Saccharomyces cerevisiae
  CDS (1)..(378)
atgtctagttgcatctctccagagtcgtccataatatcgagattcaccaggtcacatggcatcgatggaaatgtcacatccatattaagctccagctttgcgtgtcggtcacggtccaccaccaattgtggccttgttaccacagaattgaactgtccccactcgttcaccagcagaaataacgtggtcaagatgcacgataaagtgatcagcccgccggccctggtgcggactcgtacgtcctcttcggtcttagcgaatgcgtccagcgacagcaacgtggaccttttcatgatgtctattgtgtctagctatgtgtgttatatcactgtcctactccgcatgtatacgagacataaaactagctttcctttataa

SEQ ID NO: 725 - protein, 125 aa, Saccharomyces cerevisiae
MSSCISPESSIISRFTRSHGIDGNVTSILSSSFACRSRSTTNCGLVTTELNCPHSFTSRNNVVKMHDKVISPPALVRTRTSSSVLANASSDSNVDLFMMSIVSSYVCYITVLLRMYTRHKTSFPL

SEQ ID NO: 726 - DNA, 24 bp, Artificial sequence
  primer
atgtctagttgcatctctccagag

SEQ ID NO: 727 - DNA, 27 bp, Artificial sequence
  primer
ttataaaggaaagctagttttatgtct

SEQ ID NO: 728 - DNA, 636 bp, Saccharomyces cerevisiae
  CDS (1)..(636)
atgctaagacgctctaaaaattccagcactaacacaaacgcagacaccaagaaaagacaatccatgcatttaggatccaaaagttcgctaatctcgctgactagcgaatttggccatggacactccaagacgaagcagaaaaaggaggagggcacagctccttctcaattcctgtctcctacgaataagagaagcacatctagtcagtcaaagttaaaaaggagcagcttgttactggacgaaacactgcttaaagactaccactcggccatgaggcacatgcaaacaaacgctgcaaaggaagaaaagctgcggatggctccatcaccaacgcagtcaacgaggagcgaatcagacgccagtctttcctccaccaagagctcgatctcttccatattttcccaagataatgactattccattcacgatttgttgtacgaagatattgaagagatggataaaacagacgctttcaaaattaacaacacaatagcaatcgatgattctaaagctctctttgtcttctgttcaaacgactcctcctcaaggacagcgtctatcgaaacattgcacgaatcaaatttggacaacctggatatgggttccagtagaaggacatcgttggactttttttaa

SEQ ID NO: 729 - protein, 211 aa, Saccharomyces cerevisiae
MLRRSKNSSTNTNADTKKRQSMHLGSKSSLISLTSEFGHGHSKTKQKKEEGTAPSQFLSPTNKRSTSSQSKLKRSSLLLDETLLKDYHSAMRHMQTNAAKEEKLRMAPSPTQSTRSESDASLSSTKSSISSIFSQDNDYSIHDLLYEDIEEMDKTDAFKINNTIAIDDSKALFVFCSNDSSSRTASIETLHESNLDNLDMGSSRRTSLDFF

SEQ ID NO: 730 - DNA, 25 bp, Artificial sequence
  primer
atgctaagacgctctaaaaattcca

SEQ ID NO: 731 - DNA, 26 bp, Artificial sequence
  primer
ttaaaaaaagtccaacgatgtccttc

SEQ ID NO: 732 - DNA, 1719 bp, Saccharomyces cerevisiae
  CDS (1)..(1719)
atgggaagcgaaccgtttcagaaaaagaatttgggtctgcaaattaattcgcaagaaagtggaacaacccgctcaacatttcattcgctagaagatctaggagatgatgtaattaatgaaagctgggatcaggtgaaccaaaagagagccaatatagatcatgatgtctttcatgagcaccctgactcttccccatcattgtcagcacagaaagcaaaaacaaaagaagaggaagttgctgtaaagtcatcgaactcccagtcaagagacccttctcctgatactcaagcacatattccatatacttatttttccaaggatcaaagactaatcatttttggaattatcatttttataggatttttgggcccaatgtctggaaacatatatataccggctttaccattgctgcaaagggaatatgatgtaagtgcaacaacaataaacgctacagtttctgtatttatggctgttttttccgttggtccattgttttggggcgcactggcggattttggtggaaggaaattcttatatatggtgtcgttatcactaatgttaattgttaatatacttttggccgctgtaccagtcaatattgctgccctttttgttttaagaattttccaagctttcgcttccagctctgtgatttctctgggagctggcactgtaacagacgttgttcctccaaaacacaggggaaaggccatagcgtatttcatgatgggtccaaacatgggtcctattatagcacccattgttgctgggcttattttaatgaaaggaaattactggagatggctttttggtttcacttctatcatgacaggaatagcattgatcttggttactgctttacttccagaaacgctacgttgtatagttggtaatggagaccctaaatggggtgacaaaaaagatgaacgtgaaaataacgaatctccattcttcgaaggtaataaaatatcacatcggcgtctgttcccagacattggtatccgtaaaccagtcaataatgatgctttcttccaagaaaattttccaaagccgcctaaagcaggtttgacactatattggaaaatgattaaatgtcctccaataataatcacgtccgtcagtactgcactcctgttctccagttactatgcgttcagcgtcacgttttcgtattaccttgaacatgactaccgttttactatgttagaaattggtgctgcttatgtctgcccaggtgtagctatgttactaggatctcaatctggtgggcacctctcagattatcttcgttcacgctggatcaaaagtcatcctaaaaagaaattcccggcagagtttcgtttattactgaacctaattggaattttactaacaatatgtggcacaataggatacggatgggcaatcttctttcattatcattttgtggttcttttagttttttccgctctcactgcctttggtatgacctggtgcagcaacacatcaatgacatatttaactgagttattccccaaaagagctgctggaactgttgctgttagtagtttctttcgaaatgtgggcgctgccattagttccgctatcattttacagctctgtaacgcaatgggaattggatggtgttttacagggctcggtctctgcagttcaatttcattgattggtatattatatcttctcatttttcaaagaaaatatactgccaaagaattttaa

SEQ ID NO: 733 - protein, 572 aa, Saccharomyces cerevisiae
MGSEPFQKKNLGLQINSQESGTTRSTFHSLEDLGDDVINESWDQVNQKRANIDHDVFHEHPDSSPSLSAQKAKTKEEEVAVKSSNSQSRDPSPDTQAHIPYTYFSKDQRLIIFGIIIFIGFLGPMSGNIYIPALPLLQREYDVSATTINATVSVFMAVFSVGPLFWGALADFGGRKFLYMVSLSLMLIVNILLAAVPVNIAALFVLRIFQAFASSSVISLGAGTVTDVVPPKHRGKAIAYFMMGPNMGPIIAPIVAGLILMKGNYWRWLFGFTSIMTGIALILVTALLPETLRCIVGNGDPKWGDKKDERENNESPFFEGNKISHRRLFPDIGIRKPVNNDAFFQENFPKPPKAGLTLYWKMIKCPPIIITSVSTALLFSSYYAFSVTFSYYLEHDYRFTMLEIGAAYVCPGVAMLLGSQSGGHLSDYLRSRWIKSHPKKKFPAEFRLLLNLIGILLTICGTIGYGWAIFFHYHFVVLLVFSALTAFGMTWCSNTSMTYLTELFPKRAAGTVAVSSFFRNVGAAISSAIILQLCNAMGIGWCFTGLGLCSSISLIGILYLLIFQRKYTAKEF

SEQ ID NO: 734 - DNA, 1629 bp, Fungi
  CDS (1)..(1629)
atggcaggagcaacatcaagtataattcgggaaaatgattttgaggacgagcttgcggagagtatgcagtcatataatagagaaactgcagacaaattggctttgactaggaccgagagtgtaaagccagaaccggagataaccgctccgcctcactcacgcttttcccgttctttcaagacagttttaatagctcagtgcgctttcactgggtttttctccacaatagcaggtgccatctactatccagttctgagcgttatagaaagaaaattcgatattgacgaggaattggtgaatgtcactgttgtagtatattttgtatttcagggtcttgcccccacattcatgggcgggtttgccgattcactgggcaggagaccggtggtgcttgtcgcaatcgtcatttattttggtgcctgcatcggtcttgcttgtgctcaaacgtatgctcagatcattgtgctaagatgtctacaagccgccggtatttcacccgtgattgcgattaacagcggaataatgggagatgttactactagagccgagcgcggcgggtacgttggatatgttgctggatttcaagttctaggttctgcgttcggagcccttatcggtgccggattatcatctagatggggatggagagccatcttttggttcttagcaattggatctggcatttgcttcctagcctcgtttttaattttgccagaaacaaagaggaacatatccgggaatggttctgtcaccccaaaatcatacttaaatagagctcccattcttgttttgccaacagtaagaaaatcattgcatttggataatccagattacgaaacattggaactgcccacgcaactaaatctactggcgcccttcaagattttgaaagcttatgaaatttgtatacttatgctagtcgctggattacaatttgccatgtatactacgcaccttacggcgttatccacagctttgagtaaacaatatcacttgactgttgcaaaggtaggattatgctaccttccctccggtatctgcacattatgtagtattgtcattgctggaagatatttgaattggaattacaggcgcagattaaaatattaccaaaattggttgggcaagaagagatcaaagcttttagaagaacacgacaacgaccttaatttggtgcaacgtatcatagaaaatgatcccaaatacacctttaatatcttcaaggcgaggttgcaacccgcatttgttaccttgcttttaagcagtagcggattttgtgcgtacggatggtgcattactgtcaaagcccctttagcggccgttctttgcatgagtggatttgcgtcgctgttttccaattgcattttgactttttcaacaactctaatagttgatctttttcccacgaagacatctacggctacgggatgtttaaaccttttcagatgcattctatctgctgtgtttatagctgcattgagtaaaatggtagaaaaaatgaaattcggaggtgtttttacatttttgggggctttaacctcctcgtcatcgatcctcttatttattctcttgagaaaaggtaaagaattagcctttaagaggaaaaagcaagaactgggagtaaattaa

SEQ ID NO: 735 - protein, 542 aa, Fungi
MAGATSSIIRENDFEDELAESMQSYNRETADKLALTRTESVKPEPEITAPPHSRFSRSFKTVLIAQCAFTGFFSTIAGAIYYPVLSVIERKFDIDEELVNVTVVVYFVFQGLAPTFMGGFADSLGRRPVVLVAIVIYFGACIGLACAQTYAQIIVLRCLQAAGISPVIAINSGIMGDVTTRAERGGYVGYVAGFQVLGSAFGALIGAGLSSRWGWRAIFWFLAIGSGICFLASFLILPETKRNISGNGSVTPKSYLNRAPILVLPTVRKSLHLDNPDYETLELPTQLNLLAPFKILKAYEICILMLVAGLQFAMYTTHLTALSTALSKQYHLTVAKVGLCYLPSGICTLCSIVIAGRYLNWNYRRRLKYYQNWLGKKRSKLLEEHDNDLNLVQRIIENDPKYTFNIFKARLQPAFVTLLLSSSGFCAYGWCITVKAPLAAVLCMSGFASLFSNCILTFSTTLIVDLFPTKTSTATGCLNLFRCILSAVFIAALSKMVEKMKFGGVFTFLGALTSSSSILLFILLRKGKELAFKRKKQELGVN

SEQ ID NO: 736 - DNA, 1629 bp, Candida glabrata CBS 138
  CDS (1)..(1629)
atgagcacctccagcaacactagcggtgagtgttcgcccttttccattacagacagtattgtagtacaagctacagatgataatgctgataagattttacaagaggtggatttaagtgatccgaatattgataagaacgacactttcgaactaagacaacaagtatcaattaaagagagccccctttattatttaagagatataccatactcggcttacacaagttttcaggtctctctaattttccttattgtcatttataatggcttcttaggaccattggcaggtaacgtctttatacctgctctgccgctgctgcaaaaggaatttaacgtttctgaaacaaccataaatgctacggtatcagtattcatggcaacattctccatctcaccattattttggggtgccctcgcagataaaggaggcagaaagatattatatattatttcaatttctttaatggtcataataaatattctattggcaagtgtcccaaaaaaaataggatctttgatattcctaagaattattcaagcttttgcatcaagttccgtaatttcactaggagcggggacagtggctgacttgacaccaccaaaagatagaggtaaagccatggcatattttatgttgggtcccaatttgggacctattttggcgcctataattgcggggttgatattattggataacaataactggagatggttatttggattcctttgtatagtgagcggattaggtttgataatggtgattctcttattacctgaaacactgagatgtatagttggtaatggagatcgacaatgggagaattggagccaaaatgagaatgatatgtcgacacaacctgtagacttctcatcaccgatttcaaggtggtcatttgtgtcagatattggattcctgaatccaataactcaagattcaatttttaaaggtctttatccacacccaccaaagttttctgtttggacatatcttcgtattatgaccttcccgcccgtaatattaacatccatcgcgaatgcattgttattttgcacatactatagtataagtgtaacattgtctcattttcttgcaactgaatactcttattctaatcttaaaataggtgcatgttatgtgtgtcctggtgtctgtatgttgttaggatcacaaattggtgggcatttatctgattctatgagaaagagttggaagaaagagaactataatacagagtatcctttggaattccgtttaatattgactgtttgcggagttctgttagcaattggcgggtcaattgggtacggctggtgtattcaatttcactaccatatctcggcggtacttgtctttgctggtctaatggcattcggactaacatggtgcaataatacaattatgacatatctgtctgagttactctccttaagagtatctagtgccattgcagttagtagcttttttagaaatattgcagcagcaataagttcagcactaattgcaaaactgtgccaaaaaatgggtattggattttgtttcttaggtttgggtttgattaaccttgtctctttgttttcgatattggtattgattaataacagaaataaatgggttaaagacagtttctga

SEQ ID NO: 737 - protein, 542 aa, Candida glabrata CBS 138
MSTSSNTSGECSPFSITDSIVVQATDDNADKILQEVDLSDPNIDKNDTFELRQQVSIKESPLYYLRDIPYSAYTSFQVSLIFLIVIYNGFLGPLAGNVFIPALPLLQKEFNVSETTINATVSVFMATFSISPLFWGALADKGGRKILYIISISLMVIINILLASVPKKIGSLIFLRIIQAFASSSVISLGAGTVADLTPPKDRGKAMAYFMLGPNLGPILAPIIAGLILLDNNNWRWLFGFLCIVSGLGLIMVILLLPETLRCIVGNGDRQWENWSQNENDMSTQPVDFSSPISRWSFVSDIGFLNPITQDSIFKGLYPHPPKFSVWTYLRIMTFPPVILTSIANALLFCTYYSISVTLSHFLATEYSYSNLKIGACYVCPGVCMLLGSQIGGHLSDSMRKSWKKENYNTEYPLEFRLILTVCGVLLAIGGSIGYGWCIQFHYHISAVLVFAGLMAFGLTWCNNTIMTYLSELLSLRVSSAIAVSSFFRNIAAAISSALIAKLCQKMGIGFCFLGLGLINLVSLFSILVLINNRNKWVKDSF

SEQ ID NO: 738 - DNA, 1728 bp, Kluyveromyces lactis NRRL Y-1140
  CDS (1)..(1728)
atgggcgtgaatcgaagtaacagtattctatcatcagggtctcacaacagcaagacaattcaaaatatcgaaaaaaaaatggaaggcttaccatcgccgttgattacagcctctaatatatcgataaacccaaatgagaatcgtttagaaaaagagtctgatatgacagatatcagtgaaataaaagacacagattttgatagtgacaagtcgaaggaagagcaaagttctatagtacgcaacgagaaacatccagaaacggctttcacagctctagaacctgaaattgcatataatccaccatatagtgcgttttcaaactatcaggttgtgagcatactattaattataatttacattgggttcttaggacccgtgacaggtaacatttacattcccgcactacctattcttcaatccgaatttaatactagcacaactgctatcaatggtacagttgctgcatttatgggtgtttttgcagtaggacccttcttgtgggcagtacatgctgattttggaggtaggaaattcttgtacattttctccttaatgattgcacttattgccaacgttcttcttgcagcggttcctaagcatttggccgctctttacatcttaagagtgtttcaagccattggaactagtgctgtaattccgttaggggttggaactgtcagtgaccttatatctccaatgaatagagccaaaggtgtctcatatttcatgttaggaccaaatatgggcccaattcttgggcccatatttggagggttaatattaatgaatggtaatcaatggagatggttattcgggttcacttctattactactggcgtggggttaattctaatagtaacgtttttgccggaaactcttcgatgtatcgttgggaatggtgatccacggtggaaggaagattcagaatttccagcttcgttaagtatagaggaatcttcacaaacaaaggaagagtccgttgtcaagccacacatgcaattattccgtgacttgggcctacagaaaccagtcaacgacactccagtatttgccaaattgtacccaaggccacctaagccaacatggcgttcatattatctgacatttcttgagttgagagtcattatatgttccatttcaacagcaatcctattctcctcatactactgtttcagtgttattttatcgcatgagctccattcgagattcggtttcaacaacctccaaattggtgcttgttacgtgtgtcctggtattggattactatgtggttcattaagtggaggtcacctatcagattttttcaaggcaaaatcaaagaaatggattccagagtataggctctggtttcaaatttggggtctagcgattagcatggccggttgctgcggttttggctgggccattgaaaaggaactacatatagtcgttatattggttttttctttcttgttggcattcggtatgacgtggtgctcaaatgctacgatgacatttttgacagaactggataggaaaaagacagcaaccctggtttctatcagtagttttttcagaaacgcagccgcagcagtagcatcagcaatagttttcaaattaatcgaggcaatgggggctggatggtgtttcactggtcttgcattctgtgactgtgctacgatcgctggaatcgtgtatctaatgatcaaaggtaaaaaacgtagacagtcttcgcaaagtgacgtatga

SEQ ID NO: 739 - protein, 575 aa, Kluyveromyces lactis NRRL Y-1140
MGVNRSNSILSSGSHNSKTIQNIEKKMEGLPSPLITASNISINPNENRLEKESDMTDISEIKDTDFDSDKSKEEQSSIVRNEKHPETAFTALEPEIAYNPPYSAFSNYQVVSILLIIIYIGFLGPVTGNIYIPALPILQSEFNTSTTAINGTVAAFMGVFAVGPFLWAVHADFGGRKFLYIFSLMIALIANVLLAAVPKHLAALYILRVFQAIGTSAVIPLGVGTVSDLISPMNRAKGVSYFMLGPNMGPILGPIFGGLILMNGNQWRWLFGFTSITTGVGLILIVTFLPETLRCIVGNGDPRWKEDSEFPASLSIEESSQTKEESVVKPHMQLFRDLGLQKPVNDTPVFAKLYPRPPKPTWRSYYLTFLELRVIICSISTAILFSSYYCFSVILSHELHSRFGFNNLQIGACYVCPGIGLLCGSLSGGHLSDFFKAKSKKWIPEYRLWFQIWGLAISMAGCCGFGWAIEKELHIVVILVFSFLLAFGMTWCSNATMTFLTELDRKKTATLVSISSFFRNAAAAVASAIVFKLIEAMGAGWCFTGLAFCDCATIAGIVYLMIKGKKRRQSSQSDV

SEQ ID NO: 740 - DNA, 1629 bp, Kluyveromyces lactis NRRL Y-1140
  CDS (1)..(1629)
atgagaagagctagtatcagaggaacggaccttcaggcagatactgaaacgaaaaagaagaactgcgataacacaggatctgaaagctctgtcttcaggactgtaacaagagaactgcgagatgacactgatgatgttgtgacgcatgaaatatatgatgaggaatctttccctgatggttcaaaacaggaacaactctcagaagaggatgtgccgtatacccttttaacgtaccgtcagaaatggtttatggtcgcattattgacttctgcaggcttctggtcctccttagggtcgccgatttactatccagcgttgaaagagttggaagcagagtttgatgttaatgaagaacttattaatatcactgttgtcgtatacttactttttcaaggtatagccccaaccatcagcggtggtttagcggatgtgtacggaagaagacctattattttgttaggaatgttaatatatgtgattgcatctataggtcttgcatgttctaagtcgtatggtgcggttgtgttcttacgttgcctgcaaagtgcaggtatatctcctatcattgccataaattctggtgttgcaggagatttcacagtaaaatctgaacgtgggacttttgtcggcgctgtttctgggtttactttaatgggccaggcgttcggctctttgattggtgcagccttgacagcggcatatgactggcgagcaattttttggttccttgtaattggatgtgggacttgtatgattattctgtgtttcttgctaattgaaaccaaacgtaccattgtggggaacttatctattagaccaaaaagttggataaatatagccccaataactcgtttgcctgcaataaggaagcaattcaaatatgataatccagattattcatcaagagacttatcagaagtgaagttcgatatcacctcagcaatgagaattcttatattgccagaaatcatcttatcacttctccccgctgcattccaattttccttatggactctttctcttgcttctcttccagcggaacttgcattagatccatacgactactcattgactatgattggtgtatgctatttaccctctggtatcggtggcttgttaggatctttctgtacaggaaaaattattgatgtgtattataaaaggtcccataaaaagttcttggagaagaaagaggcaggtcttatcgataaagatgcaagatttaatacctttaaggctagattaatttctggtgctcctcaaaatgtttgcgctgctgtggttttcactctattcggatgggcactgaagcaaaggtggcacattgcagttgttttagttacatccttcatcggctcgttttgtgctatgagtactctttctacttcaagtacgcttttggtcgatttatacccaagtaaatcctcaacagcaacaagctgttacaatttcatgcgttgcgtattgtctgcaattttcatggcatgtttctcaaaaatgaaatcatcgatgaacgttggtgggacattcacctgcatcagtggaatggttttcgttgggaactttttaattcttattcccatgaaatatggtatgaagtggagatatgaaagaggaatgaagctttga

SEQ ID NO: 741 - protein, 542 aa, Kluyveromyces lactis NRRL Y-1140
MRRASIRGTDLQADTETKKKNCDNTGSESSVFRTVTRELRDDTDDVVTHEIYDEESFPDGSKQEQLSEEDVPYTLLTYRQKWFMVALLTSAGFWSSLGSPIYYPALKELEAEFDVNEELINITVVVYLLFQGIAPTISGGLADVYGRRPIILLGMLIYVIASIGLACSKSYGAVVFLRCLQSAGISPIIAINSGVAGDFTVKSERGTFVGAVSGFTLMGQAFGSLIGAALTAAYDWRAIFWFLVIGCGTCMIILCFLLIETKRTIVGNLSIRPKSWINIAPITRLPAIRKQFKYDNPDYSSRDLSEVKFDITSAMRILILPEIILSLLPAAFQFSLWTLSLASLPAELALDPYDYSLTMIGVCYLPSGIGGLLGSFCTGKIIDVYYKRSHKKFLEKKEAGLIDKDARFNTFKARLISGAPQNVCAAVVFTLFGWALKQRWHIAVVLVTSFIGSFCAMSTLSTSSTLLVDLYPSKSSTATSCYNFMRCVLSAIFMACFSKMKSSMNVGGTFTCISGMVFVGNFLILIPMKYGMKWRYERGMKL

SEQ ID NO: 742 - DNA, 1731 bp, Yarrowia lipolytica CLIB122
  CDS (1)..(1731)
atgaatcatctttcggatctcgaaaagggtctggaggacggtcttcagctcgacaaagacccgctggtggagatggtggatgaggagaaccacaagcaggaggaggagatacccgaaaagtcatatggaaagtcatatgacaaatcatgtgaccacgaccctcaggaggactacagccatcacaaactcgcgtccaaatcccaatcgcccgacccggacagcataagtaatcacagtacagtggctccgccatacaccatctttgacggcagtgatacattcattttgatttccgtggcgtgtgcagcggccttcttttcgtcgctttcaagcccaatctatcttcctgccatgcccattctcgaaaagaagatgcatgtcagtactgagctcatcaacttgacggtggttgtatacaacttgtttcagggtctagggcctgtggtttggggagctcttgccgatggatatggacggcggcctgtttattttggctgcttgattgtctacattggagcctgcgtcggcctggctctagtcaactcctatggagtcatgatgtttctgcgatgtcttcaggccgcaggtatagctgcaactgtgagtctaggagccggggtagttggtgatatcaccacccgaaccaaccgcggaaagattatgggcatctttcagggctgggcgctgctaggaggcggattcggacctctgattggaggagggttgaccgaggggctaggatggagaagcattttctggtttctggtgattgccagcagctgcactctgctggctgtctatttgcttctgtctgagacgagacgatcgtttgtgggaaatggcacaatctatcccgagtactggatccatcgatctccctggatgagagtgtctcctcgattgaggaaaagaatccataaagacggaggaggagacatggatacactacagccacggactaagcctcagtatctctcctttctgctcattttgaaagaaccagacgttttactcattctgtttgcggcgtctcttcattatgctgcctggttcatgttgactacagctctggcttcgtctctggccgacgtgtaccatttcaattcgctgcaaatcggtctgggcttcatttctaacggaatgggctccattgtgggctcctttgtatccggaatcatgatgaacttttactatcgcaaaaagttggaaaagtatagacaggagtgtctgggcaaatggagacaggaggaggttgtcaagagaggattgcaagacgaatctgaggtcgacgactcgacctttgaactcgacgaatcgaaattcgacattcatggagccagactcactctctgcctgcccatgtcggccattctggcagtaggaatcattgtctacggatggaccattgagtacgaggtgcaatacgtgtgtcccttggtcttcaccttttttgtctcttttggcgccatttcctatctcaactttgcctccactcttttggtcgacatttatcctgaaaaggccgcttctgctatgagttgtgtcaactttgtgcggtgcattattgccgctggaatgattgcagcggtggaccggatgattcagagcctgggacagggaggctgtttcacactcattggcggcatctgcctgcttagtaatggttgcactatggctgtgcatagatggggacctcggtgggtggccaagagaaatgcaaagaaggcgtga

SEQ ID NO: 743 - protein, 576 aa, Yarrowia lipolytica CLIB122
MNHLSDLEKGLEDGLQLDKDPLVEMVDEENHKQEEEIPEKSYGKSYDKSCDHDPQEDYSHHKLASKSQSPDPDSISNHSTVAPPYTIFDGSDTFILISVACAAAFFSSLSSPIYLPAMPILEKKMHVSTELINLTVVVYNLFQGLGPVVWGALADGYGRRPVYFGCLIVYIGACVGLALVNSYGVMMFLRCLQAAGIAATVSLGAGVVGDITTRTNRGKIMGIFQGWALLGGGFGPLIGGGLTEGLGWRSIFWFLVIASSCTLLAVYLLLSETRRSFVGNGTIYPEYWIHRSPWMRVSPRLRKRIHKDGGGDMDTLQPRTKPQYLSFLLILKEPDVLLILFAASLHYAAWFMLTTALASSLADVYHFNSLQIGLGFISNGMGSIVGSFVSGIMMNFYYRKKLEKYRQECLGKWRQEEVVKRGLQDESEVDDSTFELDESKFDIHGARLTLCLPMSAILAVGIIVYGWTIEYEVQYVCPLVFTFFVSFGAISYLNFASTLLVDIYPEKAASAMSCVNFVRCIIAAGMIAAVDRMIQSLGQGGCFTLIGGICLLSNGCTMAVHRWGPRWVAKRNAKKA

SEQ ID NO: 744 - DNA, 1518 bp, Candida albicans SC5314
  CDS (1)..(1518): transl_table=12
atgaatagtgtcactaatccagagattatgccgaaaaaggaagagccaaagcaaaatgaaacagaagcagaaacagaaaacaaattatcaacagctgacttgaaaaacggcaaaagtgttagtgattctgaaaaacaaaatgatttagaaggacaaacttctcaagattcaccttattgtgccttatctttgaaaaggaaaacaattattattggtattgtcactatagctggttgtttaggtcctatttcaggaaacatttatattcctattttacctcaattagagaatgaatttcatgtttcgactcaagtgatcaacggaacagtatcggcatttatgtttgtatttgccatagcaccattgatttgggcatcctgggccgattatggtgggaggaaaaccctatatttgataccattaatattcttcatattggctaatattttgttggcagcaactccagcaaacatcgttggattatacattttgcgagttttacaagcatttggagcatcaagtgttatatcagttggtgctgggaccgttgctgatattatagagccaaaacatagagccaaggccatatcggtatttatgtggggtcctcagttgggtccagtattgggacccgtattgtcaatcattgcctctaaaggacaatggagatggatatttggttttttagcgcttttcggctttgcagtatatttgatgattttattcttcttaccagaaactttaagatatcttgttggtaattgtgcctgctataaagatacttcaattattgtcaagccacatttgcgacaaaagaaaattgttgaaggatatcccgttcctccaaaaccaagtttcaaaaattattggatcttgataaaattcaaaccagttttgttgtgttcaattaactcgggattactatttgcaacattttatggattaatggtgacttttgcccatgttttgaaaattgagtattcatttactgatgcacaaatcagtgctagctatctctgtcccggtatctctttaataataggttccacgattggtggttgggcttctgataaaatacgagcggaaataatcaaacataatcctgacatatatgttcccgaataccggttctcattacaatttttgggattaataatatctatgactggtgtgattggctacgggtggacagtccataaacatacaaatgtagttgctgtattcatatttacttttttgggcggttttggcatgacatgggtatttgttgcaaataccacttatttgacagaatgcactactggacagccagcgacaaatgttgcaattggcaattttgcacgaaacatatctgctaccatatgcacggcagtaatagacccacttatttcttccatgggatttggttggtgtttaactggattaggtttaaccaatatattgggaattgtatttgtagttatcttattaaaatggggaccaagctggagacgacaatttctaaataaaagtacgtag

SEQ ID NO: 745 - protein, 505 aa, Candida albicans SC5314
MNSVTNPEIMPKKEEPKQNETEAETENKLSTADLKNGKSVSDSEKQNDLEGQTSQDSPYCALSLKRKTIIIGIVTIAGCLGPISGNIYIPILPQLENEFHVSTQVINGTVSAFMFVFAIAPLIWASWADYGGRKTLYLIPLIFFILANILLAATPANIVGLYILRVLQAFGASSVISVGAGTVADIIEPKHRAKAISVFMWGPQLGPVLGPVLSIIASKGQWRWIFGFLALFGFAVYLMILFFLPETLRYLVGNCACYKDTSIIVKPHLRQKKIVEGYPVPPKPSFKNYWILIKFKPVLLCSINSGLLFATFYGLMVTFAHVLKIEYSFTDAQISASYLCPGISLIIGSTIGGWASDKIRAEIIKHNPDIYVPEYRFSLQFLGLIISMTGVIGYGWTVHKHTNVVAVFIFTFLGGFGMTWVFVANTTYLTECTTGQPATNVAIGNFARNISATICTAVIDPLISSMGFGWCLTGLGLTNILGIVFVVILLKWGPSWRRQFLNKST

SEQ ID NO: 746 - DNA, 1659 bp, Coprinellus disseminatus
  CDS (1)..(1659)
atgagcatgaaactcacttccagcgatggacgggcccgtccctcctctcacgctcaaagcccccccattcaagccgcgtctattaaggatggctccgccataaattccgcgacagatactgaacgaacatcagacgaaaagcattccattttcacgaaaactgaaaaatggatcattgtctccttgatcgctttggcaggactctacagccccttgaccgcgaacatatatttccctgccatcccagcattgtctcgagacttcaacaagtccgtagaacttatcaacttgacggtcacgatgtatgtcgtcatgcagggtgtagcgcccatgttttggggtcccttggcagataggtatggtcgaagaccatgttatcttggctgccttaccgtcctcacactatccaatgttggactcgccttggtgcatacgaatgcctattggcttctaatggtccttcgttgcttgcaagcaggagggtccgctagcaccatcgctcttggtgcaggagtgataggcgatatatctactcgagaagagcgcggcggtttcttcggcatgttcaccctcggaccaatggtcggccctgtcataggccctgttatcggtggtgcgatctcagacgccctcggttggagagcattattttggttccttacaatcgcatcggccgtttgtctcttggtcatgttactcctgcaaccggaaacgctccgaagcattgttggaaatggcagtattgcacctccaaaatacaatcgaccttggctctcagtgatacccaaacagaagccgactaagcgcccagatagcgatgccaaaaacgcgtccccgggaaatccctttcgcttattcctgaatgtcgacattgtcatactcctagttatcaacgcatttacgaacagcgtgatgtatggggtcattactacgctttcgaccacgtttgaaagcatatatcctttcttgactgagacgacgataggactttgctttttggcatatggtggagggatgatcgctgggagtgccttcaccgggaaagtactcgatagggagtacaagtcgtttgcaaggaaggcggagcgcgatggtgacaacacactgaggaggaccgacactgggcgggaggctatccatctcgaaaaggtgggtgcggtacttccttttcagtgccgacttgactcattttatatccccttcggccaggctcgcttgcggctggtgccaccgtgcgcggccgtgtttgggggctgcgtttgcggatatggatggattcttcaacgcgaactgtctattgctgggccgctcatcatccacttcgtcatcggatacatgtccatggctatgatgaactcttcctcaaccctgatgatcgacctgttcccgacacaagcctcctccattacagcatgtaacaacctcgtgcgatgcaccatggctgctgtagtgatcgcagtgatacagcctataatcaacaaaattggcttggggtggacatttttcatcctcggtattcttatgatacttacgattccactcatttacctggagattgtgctggggccccgatatcgccgcttgcggttcagaaagagtcgggctaacagtgctttagaagaggtgacggaggagggaaagaaggcaaaggcgccatag

SEQ ID NO: 747 - protein, 552 aa, Coprinellus disseminatus
MSMKLTSSDGRARPSSHAQSPPIQAASIKDGSAINSATDTERTSDEKHSIFTKTEKWIIVSLIALAGLYSPLTANIYFPAIPALSRDFNKSVELINLTVTMYVVMQGVAPMFWGPLADRYGRRPCYLGCLTVLTLSNVGLALVHTNAYWLLMVLRCLQAGGSASTIALGAGVIGDISTREERGGFFGMFTLGPMVGPVIGPVIGGAISDALGWRALFWFLTIASAVCLLVMLLLQPETLRSIVGNGSIAPPKYNRPWLSVIPKQKPTKRPDSDAKNASPGNPFRLFLNVDIVILLVINAFTNSVMYGVITTLSTTFESIYPFLTETTIGLCFLAYGGGMIAGSAFTGKVLDREYKSFARKAERDGDNTLRRTDTGREAIHLEKVGAVLPFQCRLDSFYIPFGQARLRLVPPCAAVFGGCVCGYGWILQRELSIAGPLIIHFVIGYMSMAMMNSSSTLMIDLFPTQASSITACNNLVRCTMAAVVIAVIQPIINKIGLGWTFFILGILMILTIPLIYLEIVLGPRYRRLRFRKSRANSALEEVTEEGKKAKAP

SEQ ID NO: 748 - DNA, 1722 bp, Aspergillus oryzae
  CDS (1)..(1722)
atgccacatggtgctgtatgtctcgacgtggccaccgataccattcgtgctgatgacatcggcatagccttggatttcctccgctggctcatctttggatgcaaggacgatatgaggaatttagtatcaatggcgcacggcaaccaatcaacgaatgaaacggaagatattagcccggtgaactccataattcgctctaaagatcagactgacgagacaaaggtagacaacaacgaactttacccggtcggaaatgaatgtgacaagaacgatgacgctccctactgttccctttctgagcgccgaaagatctccgtgatgctaatagcatcattttccggcataatatccccaatatctgccagtatctattatccagcactccccaccattgcgaaagacatgcatgtttctatctccttgatcaacttgactatcatgacctatctgatattacaaggaatatctccctctttcaccggatccttttctgatgtctatggacgacggctcgcctacatgctctgtttcatcacctacatcggggcaaatattggccttgcattacagtccgattacgcagctttaatggtcctgcgttgtgtccaggcggctggtagcagcggaacgatcgcgatcggaagtgctgtggttgcagatatatcgacacgagctgagcgaggcaaatacattgcatatgccacgatggggacgacactgggacctgctctgggtcctgttcttggaggtctcctggatcactttcttggttggagatgggttttttggtttcttgtcatcttaggtggcttcaactttaccctcattctcgtggcatgtccagaaacgtgccgtgcagtggtgggaaacggttcaattccccctgctaaatggaatcggcctttgtgggtgatactgagggattcactaagacctcagagccataaggccggaaagagggttgactatgagactctggaaaggagcaaaacgcgcccgaatccattgacttctgttcgtatcgctctggaaaaagagggtggtttgattctcatctacggggcactgctatacgccggttacatgattattctgagcactctgacctcgcagctggagagcgagtacggatttaactccatccaggtgggattatgctacttacctatgggaatcggaagcctgacatcccgttggtccgcaggacctttgctggattggaatttcaaacgggaagctaagcgtcaaaacctacctattgtcaagaatcgccaacaagacatccgagacttcaatattgaaagaactcgtctgactattacaatacctttcgtgtatgccggttgcctgttccttcttgcatacgggtgggttatgagattccagactcacctggcggttccgttggtgttgttgttcttctccggccatctcaccacgggggctttttcgacccttagcacgctgatcgttgatattcatcgccaaagtgcggccaccgccgtggctgctaataacttgtttcgctgcttgcttgcggctggtgcgacagctttcgcggcacccctgatcgatcgtattggcattggctggacgactacgtttattgtaggtgtttggattgtcttcagtgcgtgtctgtgggcggtttatctctggggacataaatggagagatgaattgcgtgttaaacggagtgagggagatggtagcccagcatag

SEQ ID NO: 749 - protein, 573 aa, Aspergillus oryzae
MPHGAVCLDVATDTIRADDIGIALDFLRWLIFGCKDDMRNLVSMAHGNQSTNETEDISPVNSIIRSKDQTDETKVDNNELYPVGNECDKNDDAPYCSLSERRKISVMLIASFSGIISPISASIYYPALPTIAKDMHVSISLINLTIMTYLILQGISPSFTGSFSDVYGRRLAYMLCFITYIGANIGLALQSDYAALMVLRCVQAAGSSGTIAIGSAVVADISTRAERGKYIAYATMGTTLGPALGPVLGGLLDHFLGWRWVFWFLVILGGFNFTLILVACPETCRAVVGNGSIPPAKWNRPLWVILRDSLRPQSHKAGKRVDYETLERSKTRPNPLTSVRIALEKEGGLILIYGALLYAGYMIILSTLTSQLESEYGFNSIQVGLCYLPMGIGSLTSRWSAGPLLDWNFKREAKRQNLPIVKNRQQDIRDFNIERTRLTITIPFVYAGCLFLLAYGWVMRFQTHLAVPLVLLFFSGHLTTGAFSTLSTLIVDIHRQSAATAVAANNLFRCLLAAGATAFAAPLIDRIGIGWTTTFIVGVWIVFSACLWAVYLWGHKWRDELRVKRSEGDGSPA

SEQ ID NO: 750 - DNA, 1701 bp, Aspergillus oryzae
  CDS (1)..(1701)
atgcctccgacgttgcttgcaaccaatgctagaacactaacggtgaagccttttttccatgtacgctttgtgtccggatctgctgctggagatgcagagtgtaaaccacccaccgagcgcatgaagatcgggatatacgatgcctcgataacgaacacgaactgctttgtttgtgtgcggcgtacgggttggttcttcgatatcttggccatgacgagtcctaccaccagtccaccgaaccagccatgctcggttgcgaaggaggaggaaccatcaaaacttgtgactgcaccggctaaatcaccagcaagtgcagtcatacagccgccgccctatacggccttctctcgcccgaaaagagtgttcattcttgcggtggtgacagtggccggcttcttgggcccattggcaggaaacatttaccttcctgccttgcctgtcttagagcatgagtttcaagtaagcgctgcagctataaatgcaaccgtctcggtcttcatggcggtgttcgggtttggtcctctcttttggtcaagctatgcggattggaaggggcgaagaccgctgtacttgatatctttaatagtatatatcatcgctaatgttttaatggctgtgcttccgacgaactttggtgctctggtgtttttgcgcatcgtccaagctttcggttcatcggctgtcgtgtcgatgggtgctggtacagtcgctgatatcacacaacccaagcgacgcgcccgggccatgtcttatttcatgttgggccctcagtgcggtcctattttgggtccgatccttgggggtgcaatcgttggacaagcaagctggagatggattttcgcattcttggcaattctggccgttgtgctttggcccatcatgcttctattccagccggagactcttcgagcccgagtaggcaacggaaagccgtatagtaataaaggctggatactatggccacccacccccttctcttgccttgcccccgagtctgagcgcggtcctcctcccccgaagcctactctgaaaggctactggcgtctcttcacctatcctcctattggcattgtctctgtcaataccgccattctctattcgtcatatttcggaatcgcggtccagcttcctacagcattggagaatgtttatcactggaactcgactgaggtcggagctggatacgtcgctgttggtattgcgatggttgtgggctccatcgcaggcggtcgatggtccgactggcgtcgcgctcgcatggtcaacgcgcttggagaagataaagtcacaccggaggctagacttcgggaccaaattggaggcatattactctgtgccgctggttttgccatgttcggctggtttgtggatagggcaattcacccggcggcagtgctattttcaacattcttagtgggatttggaatgtcctggatcttcgtgacgactaatgccttccttactgaatgtatccgccagcaggctgcccaggcctttgcgttgggaaatatgcttcgaagccctgcggcggcagttactgcggccatcattcatccactgaccgtgaggatgggatggggatggtgcttcacagggctgtcgatactaaattttgttttagtcggttcagcgatggtcatcctgcgggtcaaatctcctgactggagaaggagaaggtctgctcacatggcaggaaattag

SEQ ID NO: 751 - protein, 566 aa, Aspergillus oryzae
MPPTLLATNARTLTVKPFFHVRFVSGSAAGDAECKPPTERMKIGIYDASITNTNCFVCVRRTGWFFDILAMTSPTTSPPNQPCSVAKEEEPSKLVTAPAKSPASAVIQPPPYTAFSRPKRVFILAVVTVAGFLGPLAGNIYLPALPVLEHEFQVSAAAINATVSVFMAVFGFGPLFWSSYADWKGRRPLYLISLIVYIIANVLMAVLPTNFGALVFLRIVQAFGSSAVVSMGAGTVADITQPKRRARAMSYFMLGPQCGPILGPILGGAIVGQASWRWIFAFLAILAVVLWPIMLLFQPETLRARVGNGKPYSNKGWILWPPTPFSCLAPESERGPPPPKPTLKGYWRLFTYPPIGIVSVNTAILYSSYFGIAVQLPTALENVYHWNSTEVGAGYVAVGIAMVVGSIAGGRWSDWRRARMVNALGEDKVTPEARLRDQIGGILLCAAGFAMFGWFVDRAIHPAAVLFSTFLVGFGMSWIFVTTNAFLTECIRQQAAQAFALGNMLRSPAAAVTAAIIHPLTVRMGWGWCFTGLSILNFVLVGSAMVILRVKSPDWRRRRSAHMAGN

SEQ ID NO: 752 - DNA, 1794 bp, Aspergillus oryzae
  CDS (1)..(1794)
atggcctcggcttgtcacgatgcagaaggcctccaagaaacaatatctaacccgggtagctttgaggaaaaagcccagggtaagagctcgggcaatgccgtcctagcccacacatcgaccagggccagcgatgtcgtgtactctgcattttcgaaagcgcagaagagatatatcgtcttttgtacatcctgggctggtttcttttccccggtgtcttcacagatttactatccggccttaaacaccctagccaatgatctacatgtctcaggtggcttgataaatctgactctcatgagctacatggtacgagtaccatttccccgtctgtccatgaataagaaaacttacgataagaagattttccaagggctatcgcccatgttcgtgggtgactttgcagacaaagcaggccgacggccagcctacatcggatgtttcatcctgtacatagcagccaacattggacttgcactacaaaacaactacgccgcactgttcgttctccgctgtctacaaagcgccggaatcagcactaccattgcgctcggttcgggggtggtgtcggatatcgcaactgccgcggagcggggctcatatatgggcttcgtaactgccggcacgctactgggcccgtccgtgggtccggtcatcggaggcctcctggcgcagtatctaggatggcgagctatattctggtttctgactatattcgccggcaccttcaccatccagttcttactcttcttccctgaaacggcccggaaagtagtcggcaacgggtctctcccgcctccaacctggaacctatcattaatcaactggtatcaaaccagatccagaagaacagaagaagaacaagaggaagcaaccaacaccacagaagaaagaaataaaatcacattcccaaacccactaagaaccctctcgatcgtcttccaaaaagacacaagcctaatcctgctctccaacgccatcctcttcgccggcttctacgacgtcagcgcctccatcccctcaatctaccaggacctatacaacctcaacgacctccaaatcggcctctgctacatccccttcggcctcggcgccacactcgcctccatcatctccggcaaaatcctcgactccaactaccgccgcctcgcaaaacaactcaacatccccctccacaactccacctccagggacctaaaagacttccccatcgaaaaagcccgtctccaactcgccttcccattactagcaatcggcagtctaactgtaatcgccttcggatgggtcctccacttcggtgtccatctagcggctcccaccaccatcctattcgtaatgggactaggcttgaccggcgcattcaatacagtaagtacgttgcttgtggatctgtaccccgggaatgcgagcgccgcgacagcgtcgaataatttcgtccgctgtttgctgggcgcgggtgctacggcgctcattgatcctatgttgaatgctatggggaggggatggtgttttacgttcattgcgtttgtgatgttggccacggcgccgcttttgggggttgttgtgaggtttgggccgaggtggagggaggagagccccccaaaaacaaaacccaaaaccagatataatcgaccaaaagacatacaaagaaaagaaacaatcccagttgctgaatatccggtgcattgctcgctaaatccgtccaattcaaatcatatcgtgacatcccagatgcaagagaaggctcaatgtgaagtaaaactgaccagagaaggaaatgcaagagatagtatgtga

SEQ ID NO: 753 - protein, 597 aa, Aspergillus oryzae
MASACHDAEGLQETISNPGSFEEKAQGKSSGNAVLAHTSTRASDVVYSAFSKAQKRYIVFCTSWAGFFSPVSSQIYYPALNTLANDLHVSGGLINLTLMSYMVRVPFPRLSMNKKTYDKKIFQGLSPMFVGDFADKAGRRPAYIGCFILYIAANIGLALQNNYAALFVLRCLQSAGISTTIALGSGVVSDIATAAERGSYMGFVTAGTLLGPSVGPVIGGLLAQYLGWRAIFWFLTIFAGTFTIQFLLFFPETARKVVGNGSLPPPTWNLSLINWYQTRSRRTEEEQEEATNTTEERNKITFPNPLRTLSIVFQKDTSLILLSNAILFAGFYDVSASIPSIYQDLYNLNDLQIGLCYIPFGLGATLASIISGKILDSNYRRLAKQLNIPLHNSTSRDLKDFPIEKARLQLAFPLLAIGSLTVIAFGWVLHFGVHLAAPTTILFVMGLGLTGAFNTVSTLLVDLYPGNASAATASNNFVRCLLGAGATALIDPMLNAMGRGWCFTFIAFVMLATAPLLGVVVRFGPRWREESPPKTKPKTRYNRPKDIQRKETIPVAEYPVHCSLNPSNSNHIVTSQMQEKAQCEVKLTREGNARDSM

SEQ ID NO: 754 - DNA, 1683 bp, Aspergillus oryzae
  CDS (1)..(1683)
atggaaaaagaaggcacatctgccgggatgccgccagattatacccgcagagagcatgagagacacgcgatggatccaccacaaaggagcaccaccgataccgatagtgatctccattccatatcacatgaggaccatccacctcaagcatttgaaggaaaagatgaagaatgccgcccttcctatgcctcggacacaagccgtgatgctgcggttgtagtgccgcgaccgaatcgcagaggactctttggtcagttcacgctgctggcggaagttgaaaacccgaagacttattctcggaagaaaaaatggttcgtcactttcattgttgcgtgggcaggagccacagcccctatgggaagcgcaatactcttccctgccctctctcaggtcactaaagagttaaactcgacaaccactgtggcgaatctcaatatatcgttgtacatgcttagtatgtcaatctttccattatggtggtcatctttcagtgaaaagctggggcgacggactatataccttgtatccttttgcctcttcgtgatattcaatgttctatgtgctatttccaagtcgatggccatgctcattgtcatgcggatgctcagtggtggagcttctgcttcggtccaggcggtcggagcagggacaattgcggacctatgggaatctcaagagagaggccgtgccatggggatattctaccttggaccattatgcggtccgttggtggctcctattgttggaggcgctttggctcaacggtggaagtggaggagtacattatggtttctagcagcttatggaggcataaccgtcgcgttcatattctttgcccttccagagacgttgatctcggcgaaatcccctagtcccaatacaagtaacgagcaacaggaaccgattggacgtcggctgagccgagtctcttcccggcaggttgtggggttaaccacaaggtggctgaaggtcctcaagatggctctcgtcgatccgctgaaaatcgtgctttatcttcgatatccaccagtcctactaacggtatactacgcaagtatcacgttcggctctctttatgtgttgaatgtcagtgttgaacacactttcgggagcgatccatacaacttcactacgatccttgtcggtctgctctatatcccaaattctttgggctatgttgtcgccagtacatttggagggcgatggatggacaatatcatgcagcgagaagctagaaaggcacaaagatatgatgagaatggcaatttgatctatcaccccgaagatcgcatgcgtgagaatgcctggcttggtgcttttttgtaccctgctgcgttaatttggtatggctggaccgcagaccggggtgtattctggcttgtgccgatgattgcaaatttcttctttggcataggatctatgcttatctttagcatggcaacgacgatgttgacggaattcatgcccaagaaggcttcctcgggagtcgcactgaataacttcatgaggaatatcttctcctgcgttggctctttggtcacagctcctattatcgacgccattggtaacggatggctgtttactatactcgggattgttgcgtttctaagcagctctgtcctgtttgcgatgaaggtcttcgggcctcgttggagaaagtcgatggatgcactcaggcattga

SEQ ID NO: 755 - protein, 560 aa, Aspergillus oryzae
MEKEGTSAGMPPDYTRREHERHAMDPPQRSTTDTDSDLHSISHEDHPPQAFEGKDEECRPSYASDTSRDAAVVVPRPNRRGLFGQFTLLAEVENPKTYSRKKKWFVTFIVAWAGATAPMGSAILFPALSQVTKELNSTTTVANLNISLYMLSMSIFPLWWSSFSEKLGRRTIYLVSFCLFVIFNVLCAISKSMAMLIVMRMLSGGASASVQAVGAGTIADLWESQERGRAMGIFYLGPLCGPLVAPIVGGALAQRWKWRSTLWFLAAYGGITVAFIFFALPETLISAKSPSPNTSNEQQEPIGRRLSRVSSRQVVGLTTRWLKVLKMALVDPLKIVLYLRYPPVLLTVYYASITFGSLYVLNVSVEHTFGSDPYNFTTILVGLLYIPNSLGYVVASTFGGRWMDNIMQREARKAQRYDENGNLIYHPEDRMRENAWLGAFLYPAALIWYGWTADRGVFWLVPMIANFFFGIGSMLIFSMATTMLTEFMPKKASSGVALNNFMRNIFSCVGSLVTAPIIDAIGNGWLFTILGIVAFLSSSVLFAMKVFGPRWRKSMDALRH

SEQ ID NO: 756 - DNA, 24 bp, Artificial sequence
  primer
atgggaagcgaaccgtttcagaaa

SEQ ID NO: 757 - DNA, 28 bp, Artificial sequence
  primer
ttaaaattctttggcagtatattttctt

SEQ ID NO: 758 - protein, 484 aa, Artificial sequence
  consensus sequence
  Variant (2)..(9): Xaa in position 2 to 9 is any amino acid
  Variant (12)..(12): Xaa in position 12 is any amino acid
  Variant (16)..(28): Xaa in position 16 to 28 is any amino acid
  Variant (31)..(31): Xaa in position 31 is any amino acid
  Variant (33)..(43): Xaa in position 33 to 43 is any amino acid
  Variant (44)..(61): Xaa in position 44 to 61 is any or no amino acid
  Variant (63)..(68): Xaa in position 63 to 68 is any amino acid
  Variant (71)..(72): Xaa in position 71 to 72 is any amino acid
  Variant (75)..(77): Xaa in position 75 to 77 is any amino acid
  Variant (79)..(91): Xaa in position 79 to 91 is any amino acid
  Variant (94)..(103): Xaa in position 94 to 103 is any amino acid
  Variant (104)..(105): Xaa in position 104 to 105 is any or no amino acid
  Variant (108)..(109): Xaa in position 108 to 109 is any amino acid
  Variant (111)..(120): Xaa in position 111 to 120 is any amino acid
  Variant (122)..(122): Xaa in position 122 is any amino acid
  Variant (124)..(126): Xaa in position 124 to 126 is any amino acid
  Variant (128)..(133): Xaa in position 128 to 133 is any amino acid
  Variant (135)..(147): Xaa in position 135 to 147 is any amino acid
  Variant (149)..(152): Xaa in position 149 to 152 is any amino acid
  Variant (154)..(163): Xaa in position 154 to 163 is any amino acid
  Variant (164)..(165): Xaa in position 164 to 165 is any or no amino acid
  Variant (168)..(169): Xaa in position 168 to 169 is any amino acid
  Variant (171)..(171): Xaa in position 171 is any amino acid
  Variant (174)..(174): Xaa in position 174 is any amino acid
  Variant (176)..(188): Xaa in position 176 to 188 is any amino acid
  Variant (192)..(192): Xaa in position 192 is any amino acid
  Variant (194)..(195): Xaa in position 194 to 195 is any amino acid
  Variant (199)..(270): Xaa in position 199 to 270 is any amino acid
  Variant (271)..(301): Xaa in position 271 to 301 is any or no amino acid
  Variant (303)..(309): Xaa in position 303 to 309 is any amino acid
  Variant (311)..(312): Xaa in position 311 to 312 is any amino acid
  Variant (314)..(316): Xaa in position 314 to 316 is any amino acid
  Variant (318)..(323): Xaa in position 318 to 323 is any amino acid
  Variant (325)..(327): Xaa in position 325 to 327 is any amino acid
  Variant (329)..(331): Xaa in position 329 to 331 is any amino acid
  Variant (333)..(345): Xaa in position 333 to 345 is any amino acid
  Variant (346)..(385): Xaa in position 346 to 385 is any or no amino acid
  Variant (388)..(404): Xaa in position 388 to 404 is any amino acid
  Variant (405)..(405): Xaa in position 405 is any or no amino acid
  Variant (408)..(437): Xaa in position 408 to 437 is any amino acid
  Variant (439)..(458): Xaa in position 439 to 458 is any amino acid
  Variant (460)..(463): Xaa in position 460 to 463 is any amino acid
  Variant (465)..(467): Xaa in position 465 to 467 is any amino acid
  Variant (469)..(477): Xaa in position 469 to 477 is any amino acid
  Variant (479)..(479): Xaa in position 479 is any amino acid
  Variant (481)..(482): Xaa in position 481 to 482 is any amino acid
GXXXXXXXXIYXPALXXXXXXXXXXXXXINXTXXXXXXXXXXXXXXXXXXXXXXXXXXXXXPXXXXXXADXXGRXXXYXXXXXXXXXXXXXLAXXXXXXXXXXXXLRXXQXXXXXXXXXXGXGXXXDXXXXXXRXXXXXXXXXXXXXGXXXXPXXXXXXXXXXXXWRXXFXFLXIXXXXXXXXXXXXXPETXRXXVGNXXXXXXXXXXXXXXXXXXXXXXXXXXXXXXXXXXXXXXXXXXXXXXXXXXXXXXXXXXXXXXXXXXXXXXXXXXXXXXXXXXXXXXXXXXXXXXXXXXXXXXXYXXXXXXXGXXYXXXGXXXXXXSXXXGXXXDXXXXXXXXXXXXXXXXXXXXXXXXXXXXXXXXXXXXXXXXXXXXXXXXXXXXXRLXXXXXXXXXXXXXXXXXXGWXXXXXXXXXXXXXXXXXXXXXXXXXXXXXXTXXXXXXXXXXXXXXXXXXXXRXXXXAXXXAXXXXXXXXXGXGXXFT

SEQ ID NO: 759 - protein, 44 aa, Artificial sequence
  protein pattern
  Variant (2)..(3): Xaa in position 2 to 3 is any amino acid
  Variant (4)..(4): Xaa in position 4 is Gly or Ser
  Variant (5)..(5): Xaa in position 5 is Pro, Ser or Thr
  Variant (6)..(6): Xaa in position 6 is Ile, Leu, Met or Val
  Variant (7)..(7): Xaa in position 7 is Ala, Gly, Ser or Thr
  Variant (8)..(8): Xaa in position 8 is Ala, Gly or Ser
  Variant (9)..(9): Xaa in position 9 is any amino acid
  Variant (10)..(10): Xaa in position 10 is Ile or Val
  Variant (11)..(11): Xaa in position 11 is Phe or Tyr
  Variant (12)..(12): Xaa in position 12 is any amino acid
  Variant (14)..(14): Xaa in position 14 is Ala, Ile or Val
  Variant (15)..(15): Xaa in position 15 is Ile or Leu
  Variant (16)..(17): Xaa in position 16 to 17 is any amino acid
  Variant (18)..(18): Xaa in position 18 is Ile or Leu
  Variant (19)..(19): Xaa in position 19 is Ala, Glu, Gln or Ser
  Variant (20)..(20): Xaa in position 20 is any amino acid
  Variant (21)..(21): Xaa in position 21 is Asp, Glu or Lys
  Variant (22)..(24): Xaa in position 22 to 24 is any amino acid
  Variant (25)..(25): Xaa in position 25 is Asp, Asn or Ser
  Variant (26)..(26): Xaa in position 26 is any amino acid
  Variant (27)..(27): Xaa in position 27 is Ala, Glu, Gly, Gln, Ser or Thr
  Variant (28)..(28): Xaa in position 28 is any amino acid
  Variant (29)..(29): Xaa in position 29 is Ile or Val
  Variant (31)..(31): Xaa in position 31 is Ala, Gly, Ile, Leu or Val
  Variant (33)..(42): Xaa in position 33 to 42 is any amino acid
  Variant (43)..(43): Xaa in position 43 is any or no amino acid
GXXXXXXXXXXXPXXXXXXXXXXXXXXXXNXTXXXXXXXXXXXP

SEQ ID NO: 760 - protein, 33 aa, Artificial sequence
  protein pattern
  Variant (2)..(2): Xaa in position 2 is any amino acid
  Variant (3)..(3): Xaa in position 3 is Phe, Ile, Leu or Val
  Variant (4)..(4): Xaa in position 4 is Gln or Ser
  Variant (5)..(5): Xaa in position 5 is Ala, Gly or Ser
  Variant (6)..(6): Xaa in position 6 is any amino acid
  Variant (7)..(7): Xaa in position 7 is Ala or Gly
  Variant (8)..(8): Xaa in position 8 is any amino acid
  Variant (9)..(9): Xaa in position 9 is Ala or Ser
  Variant (10)..(10): Xaa in position 10 is Ala, Gly, Ser or Thr
  Variant (11)..(11): Xaa in position 11 is Thr or Val
  Variant (12)..(12): Xaa in position 12 is any amino acid
  Variant (13)..(13): Xaa in position 13 is Ala, Pro or Ser
  Variant (14)..(14): Xaa in position 14 is Ile, Leu, Met or Val
  Variant (16)..(16): Xaa in position 16 is Ala, Ser or Val
  Variant (17)..(17): Xaa in position 17 is Ala or Gly
  Variant (18)..(18): Xaa in position 18 is Thr or Val
  Variant (19)..(19): Xaa in position 19 is Ile or Val
  Variant (20)..(20): Xaa in position 20 is Ala, Gly, Ser or Thr
  Variant (22)..(24): Xaa in position 22 to 24 is any amino acid
  Variant (25)..(27): Xaa in position 25 to 27 is any or no amino acid
  Variant (29)..(29): Xaa in position 29 is Ala or Gly
  Variant (30)..(31): Xaa in position 30 to 31 is any amino acid
  Variant (32)..(32): Xaa in position 32 is Phe, Ile, Met or Val
  Variant (33)..(33): Xaa in position 33 is Ala, Gly or Ser
RXXXXXXXXXXXXXGXXXXXDXXXXXXRXXXXX

SEQ ID NO: 761 - protein, 25 aa, Artificial sequence
  protein pattern
  Variant (2)..(2): Xaa in position 2 is Cys, Asn or Ser
  Variant (3)..(4): Xaa in position 3 to 4 is any amino acid
  Variant (5)..(5): Xaa in position 5 is Ala, Gly or Ser
  Variant (6)..(6): Xaa in position 6 is Ala or Cys
  Variant (7)..(7): Xaa in position 7 is Gly, Ile or Val
  Variant (8)..(9): Xaa in position 8 to 9 is any amino acid
  Variant (10)..(10): Xaa in position 10 is Ala or Leu
  Variant (11)..(14): Xaa in position 11 to 14 is any amino acid
  Variant (15)..(15): Xaa in position 15 is Ile, Leu or Met
  Variant (16)..(18): Xaa in position 16 to 18 is any amino acid
  Variant (19)..(19): Xaa in position 19 is Ile, Leu or Met
  Variant (20)..(21): Xaa in position 20 to 21 is any amino acid
  Variant (23)..(24): Xaa in position 23 to 24 is any amino acid
RXXXXXXXXXXXXXXXXXXXXGXXF

SEQ ID NO: 762 - protein, 13 aa, Artificial sequence
  protein pattern
  Variant (3)..(3): Xaa in position 3 is any amino acid
  Variant (4)..(4): Xaa in position 4 is Ile, Leu or Val
  Variant (6)..(6): Xaa in position 6 is any amino acid
  Variant (8)..(8): Xaa in position 8 is any amino acid
  Variant (9)..(9): Xaa in position 9 is Ala, Cys, Ser, Thr or Val
  Variant (11)..(11): Xaa in position 11 is any amino acid
  Variant (12)..(12): Xaa in position 12 is Ala, Cys, Gly, Ser or Thr
  Variant (13)..(13): Xaa in position 13 is Ala, Gly, Ser or Val
WRXXFXFXXIXXX

SEQ ID NO: 763 - protein, 12 aa, Artificial sequence
  protein pattern
  Variant (2)..(2): Xaa in position 2 is Gly or Pro
  Variant (3)..(4): Xaa in position 3 to 4 is any amino acid
  Variant (7)..(8): Xaa in position 7 to 8 is Ile, Leu or Val
  Variant (9)..(9): Xaa in position 9 is Ala or Gly
  Variant (10)..(10): Xaa in position 10 is Gly or Pro
  Variant (11)..(11): Xaa in position 11 is Gly, Ile, Leu or Val
  Variant (12)..(12): Xaa in position 12 is Phe, Ile, Leu or Val
GXXXGPXXXXXX

SEQ ID NO: 764 - DNA, 870 bp, Saccharomyces cerevisiae
  CDS (1)..(870)
atgaacagagtttcgtttattaaaacgcctttcaacataggggcgaaatggagattagaagatgtctttttgctcattatcatgatacttcttaactacccagtgtattaccaacaaccgttcgaacgtcagttttacattaacgatctcactatatcgcatccttatgcgacaactgaacgtgtaaataacaacatgttgtttgtttatagttttgtcgtgccatctttaaccatattgataattggttccattttggccgatagaagacatttgatttttattttgtacacatctctccttggtttatcactcgcttggttcagtacgagtttctttacaaacttcatcaagaattggattggaagactaagaccagattttctagatcgttgccaacctgttgaaggcttgccattggacactttatttactgcaaaagatgtgtgtacgactaagaatcacgaacgtctgttggatgggtttaggacaactccgtcaggtcattcaagtgaaagctttgcaggactgggttatttgtacttctggctatgtgggcaacttttgactgaatcaccgttgatgcctttatggagaaaaatggtggcctttctaccactgttaggagctgcactaattgctctatccagaactcaagattacagacatcatttcgtcgatgtaattttagggtctatgttgggttatataatggcacactttttctacagaagaatcttcccacccattgatgatcctcttccgttcaaaccattgatggacgattcagatgtcaccctggaggaagcagtcacccatcagaggatcccggatgaggaattacatcctttgtccgatgaaggtatgtaa

SEQ ID NO: 765 - protein, 289 aa, Saccharomyces cerevisiae
MNRVSFIKTPFNIGAKWRLEDVFLLIIMILLNYPVYYQQPFERQFYINDLTISHPYATTERVNNNMLFVYSFVVPSLTILIIGSILADRRHLIFILYTSLLGLSLAWFSTSFFTNFIKNWIGRLRPDFLDRCQPVEGLPLDTLFTAKDVCTTKNHERLLDGFRTTPSGHSSESFAGLGYLYFWLCGQLLTESPLMPLWRKMVAFLPLLGAALIALSRTQDYRHHFVDVILGSMLGYIMAHFFYRRIFPPIDDPLPFKPLMDDSDVTLEEAVTHQRIPDEELHPLSDEGM

SEQ ID NO: 766 - DNA, 933 bp, Oryza sativa (japonica cultivar-group)
  CDS (1)..(933)
atggctgatacccagttagggtgccatactataggatctcatggcattaaagtggcaaaattccatttgtatgattggatgatacttatctttctagctgttgtttatgggctgttcaacataattgagccttttcaccgcttcgttggaagtgacatgctgacagacttgagatatccactgaagggcaatacagttccattttgggctgttccactgattgcaattgtgctgccctgggccatctttggtggaatttacttcaaaaagaaaaatgtctatgatttgcaccatggcattctggggattctatattcggtgcttataactgctgtgattactgatgcaattaagaatggtgttggtcgcccacgcccagatttcttttggcgttgtttccctgatggaaagcctaatttcaataatgtcactggtgatgtcatatgccatggagaaaggagtgtcatcaaggaaggctacaagagcttcccaagtgggcattcttcaggggcttttgctggtctgggttttcttgcgtggtacttagcaggcaaacttaaagcttttaaacgtgaagggcatattgcaaaactatgcctagtctttctgcctctacttgttgcatcacttgtggcagtctctcgggttgacgattactggcatcactggcaagatgtatttgcaggcggcattataggtctcacagttgcttcgttttgttacctgcaatttttcccatatccatttgatgctgatgctatatggcctcatgctcacttccaactgctagccgagtcacgaagcaacggtaatgaaaactcacacaacatgggatggacagagaccgacgctttccatgaaggcgctggtgctgttgcgctgagagacacaagcctggttctagactcgatggagtctggcaggaggttttga

SEQ ID NO: 767 - protein, 310 aa, Oryza sativa (japonica cultivar-group)
MADTQLGCHTIGSHGIKVAKFHLYDWMILIFLAVVYGLFNIIEPFHRFVGSDMLTDLRYPLKGNTVPFWAVPLIAIVLPWAIFGGIYFKKKNVYDLHHGILGILYSVLITAVITDAIKNGVGRPRPDFFWRCFPDGKPNFNNVTGDVICHGERSVIKEGYKSFPSGHSSGAFAGLGFLAWYLAGKLKAFKREGHIAKLCLVFLPLLVASLVAVSRVDDYWHHWQDVFAGGIIGLTVASFCYLQFFPYPFDADAIWPHAHFQLLAESRSNGNENSHNMGWTETDAFHEGAGAVALRDTSLVLDSMESGRRF

SEQ ID NO: 768 - DNA, 879 bp, Gibberella zeae PH-1
  CDS (1)..(879)
atgcgccaaatggagactcactctttgcagacaactcatgcgcctgattacgtcggttttctctttctcctagctggctggatcctgacagttctcttcgtcgatccgtttcatcgcatgttcttcatcaacgatcttcaaatctcgtacccgtatgcggttcatgagcgtgttcccgtcttcatgaactttgtatacgccctgttcataccgctgggagtcctcattgccttcaacgtagccacaagagcaccagctgccaagcatgaagtcacctacctttcgttccttatttccatcgtactcacatccttcatcactgacatcatcaagaacgctgttggccggcctcgacccgacttactggaccgttgccagcctgcagttggcacaaaggccaatactcttgttaccatcgacgtatgcacgagagaggacggacatatcctccaagaggggtggcggtcattcccttctggccattcgtccttctcattcgcaggcttgggatttctcagcctttttcttgctggacaactccatgttttccgctacgcagccggtggccgtgacctgagccgggcattggtctgccttctaccgctcatcggagctggcatggtcgccatctcccgatgtgaggattaccgccacgacgtttatgacgtctgcgtcggctcggctctgggcatgagtattgcatattggagctacagacgccactggcctcgactgtctagccaaaagtgtgacgagccgtatccgcgaccaggagtcgatacccagcccggctggcaacgcttcaccgatgatgaggaggccgcaagagggacagatgtaggattcgagatggacaacttgagaggttcgcgacgctga

SEQ ID NO: 769 - protein, 292 aa, Gibberella zeae PH-1
MRQMETHSLQTTHAPDYVGFLFLLAGWILTVLFVDPFHRMFFINDLQISYPYAVHERVPVFMNFVYALFIPLGVLIAFNVATRAPAAKHEVTYLSFLISIVLTSFITDIIKNAVGRPRPDLLDRCQPAVGTKANTLVTIDVCTREDGHILQEGWRSFPSGHSSFSFAGLGFLSLFLAGQLHVFRYAAGGRDLSRALVCLLPLIGAGMVAISRCEDYRHDVYDVCVGSALGMSIAYWSYRRHWPRLSSQKCDEPYPRPGVDTQPGWQRFTDDEEAARGTDVGFEMDNLRGSRR

SEQ ID NO: 770 - DNA, 894 bp, Candida glabrata CBS 138
  CDS (1)..(894)
atgaacattgacagattgacatttgggctagcacgtggggaacgtgagagcaatagtcgcctagagaggttggccaccactacatcttcaaaatggcgtatacaggacgtatgcctgctattgataattatggtagtcaattatccggtgtattaccaggaaccttttcaaaggcagttttccctggatgacagaaccatttcccatccatatgcggaggtagaaagagttaatgatgtgatgttattcatatacagctttattgttcctgctttatcgatattcgtggtttggcttctttttgccgaccctagacatagatactacctaatatatgtttcgatgctgggtttgatatttgcttggtttagttgtagcctgttcacaaacttcattaagaattggattggaagactgagacctgacttcttggctagatgccaaccaagatcagatctaccaaccgataggtactacactatcgatgaggtttgtaccactgaaaattacgatgtattgctagatggtttcaggactacaccttctggccactcaagtgaaagttttgctggcctgggctacctatattactggctttgtggtcaactccttacagaaaagaagtacgtaggtctatggagaaagacgttagccttagtacctctattaatagcctctctaattgctctatcccgtactcaggattacagacaccattttattgatgtgatcatcgggtcgatcttggggatggtttttgcacactttacttacagacgctatttcccatcaattactgacgagctaccgttcaagcctttgctcgatgattcaacagttggcaccgacttgtattctagcgcaaacgaagaagtctctttaccaacagtataa

SEQ ID NO: 771 - protein, 297 aa, Candida glabrata CBS 138
MNIDRLTFGLARGERESNSRLERLATTTSSKWRIQDVCLLLIIMVVNYPVYYQEPFQRQFSLDDRTISHPYAEVERVNDVMLFIYSFIVPALSIFVVWLLFADPRHRYYLIYVSMLGLIFAWFSCSLFTNFIKNWIGRLRPDFLARCQPRSDLPTDRYYTIDEVCTTENYDVLLDGFRTTPSGHSSESFAGLGYLYYWLCGQLLTEKKYVGLWRKTLALVPLLIASLIALSRTQDYRHHFIDVIIGSILGMVFAHFTYRRYFPSITDELPFKPLLDDSTVGTDLYSSANEEVSLPTV

SEQ ID NO: 772 - DNA, 894 bp, Kluyveromyces lactis NRRL Y-1140
  CDS (1)..(894)
atgggcatagatcgtgtatctttcggtacagataggctaaagttctacaagtctcttaaaaaatggaaactcactgatttgattttatgtgtcgtactatttcttgtgaatattcctgtgtactatcagaaaccgtttcaaagacaattctttattaacgacttgactatttcacatccgtttgctgaggttgagatggtaaataaccatgccttgatagtttacagttatttcgttccattttttactatcattctattttccttactactagcagatagcaagcacagatggtatttgatgtacatttctttacttgggctttctttcacatggatttcgacttctttgttgacaaattatttgaaaaattggtttggtagacacagaccagattttttggctcgttgtgctcccaagcatggtacaccaaagaacactttggtgtatgctatcgacgtttgtacaagtaccgattacgctgtgttatatgatggattcagaaccacaccatctggtcactccagtgaatcctttgctggtctagggttcttgttcctatggttatgtgggcaattgttgactgaattacccgaaacgggctcttggagaacaatcgttgcgtgtttaccattagttggtgcatctgttatagcattaagcaggacgcaggattacagacaccatttcgttgatgttatgctgggttctctacttggtatcttggttgcacattggtcttacagaagatatttcccttcaatccattccaaacttcctttcaagccacttttggacgattctgatgtggtgttggaggaatactctcaagttcgttcttccggtactgatgaagagctacttccaatttctcgttcaaccaataataactaa

SEQ ID NO: 773 - protein, 297 aa, Kluyveromyces lactis NRRL Y-1140
MGIDRVSFGTDRLKFYKSLKKWKLTDLILCVVLFLVNIPVYYQKPFQRQFFINDLTISHPFAEVEMVNNHALIVYSYFVPFFTIILFSLLLADSKHRWYLMYISLLGLSFTWISTSLLTNYLKNWFGRHRPDFLARCAPKHGTPKNTLVYAIDVCTSTDYAVLYDGFRTTPSGHSSESFAGLGFLFLWLCGQLLTELPETGSWRTIVACLPLVGASVIALSRTQDYRHHFVDVMLGSLLGILVAHWSYRRYFPSIHSKLPFKPLLDDSDVVLEEYSQVRSSGTDEELLPISRSTNNN

SEQ ID NO: 774 - DNA, 825 bp, Debaryomyces hansenii CBS767
  CDS (1)..(825)
atgatcagatacttaaaaagtgacatattcaagaaatatgtgcccgactggacccttggagttggtttaattatttacttctttgctattgcagagcatgcaaggccatttgctaggcaatttagtttatctgatctaacaatccagcacccgtttgcagtgcaagaaagagtaacaggtatagattgcataataatatcatctattgggcctgtcattgtgatgttgttggttgttgcatttagcagcagggggcagaagttttcacacgatcaaatccaccttctccaaatttcggtattggggttatttttgagtttgagtattaatggggtgttcactgatattttgaagaactggatcgcaagaccaagacctgatttcttggcgagatgtggtcccaagaaaggaacatcattagttgagttggttggaatagatgtatgtaccgctccattgggtcaaactgccttggtagatggtatgaggtcgactccctcgggtcattcatcgatatctttctctggattgctctatttgacgttgtggttggttggacagttccaacttttcaataagtcacaccctctttataaattattgctttgtctgactccgttgcttgttgcgtgttacattgctttaagtagaacacaagattacagacatcactttacggatatcataatgggaggaactataggtatcggttttgcattatcggtttatcatagatattttccatacgtatggagtaaaaacagtaaccaccctatcactgacgaagatgacactatgattttaccaacatataatactaattag

SEQ ID NO: 775 - protein, 274 aa, Debaryomyces hansenii CBS767
MIRYLKSDIFKKYVPDWTLGVGLIIYFFAIAEHARPFARQFSLSDLTIQHPFAVQERVTGIDCIIISSIGPVIVMLLVVAFSSRGQKFSHDQIHLLQISVLGLFLSLSINGVFTDILKNWIARPRPDFLARCGPKKGTSLVELVGIDVCTAPLGQTALVDGMRSTPSGHSSISFSGLLYLTLWLVGQFQLFNKSHPLYKLLLCLTPLLVACYIALSRTQDYRHHFTDIIMGGTIGIGFALSVYHRYFPYVWSKNSNHPITDEDDTMILPTYNTN

SEQ ID NO: 776 - DNA, 930 bp, Debaryomyces hansenii CBS767
  CDS (1)..(930)
atggacaacgtcaaaaaaaaggtctacagcgcgttgaactatttccacacggacgatgacttcaatcgagttacatttggattgaaaagaaatgcattatcagcccgtttagtgaggtggagattcgcagatttagtcttattgggagtgttgtgtgttttgtacattgtcacgtataagattgagccatttcagaggcagtttttcatcaacgaccttacgatctcgcatccgtttgcagaatccgaaagagtgacaaatggggcattattcttctattcggtgtgggagccaataatggttatcggcgtgataggattaatcatgacaaagcccgagaacaagatatacgtgacgtacgtgtcgattcttggactctgcatctcttgcttcaccactagcgtggttactgacgttctcaagaatttaatcggcagacatcgtcctgatttcctcgctcgttgtgttcctagaagcgacgcacctctcaatgtaatggtctttgccaaagatgtctgcaccaccgataatcttgacttattgaaagacggcttccgtaccacgccttcgggccattccagtatcagtttttccggtctcgtgtacttgtcgttgtggttaagtggtcaattggttatcatgaacgaaaatctgggctactggagatctatcctcgcgtggattcctacattgcaatgtacatatattgcgttgagtcgtaccgaagactacagacatcattttgtcgatgtcatcataggaagtcttattggattaggtatggcatgttgggcttatcgcagattatttccacatatcacccatccaaaatcatatgaaccatatattatcatttctgaagaagaagataatgacaatcccgatacacagtataatagaatcaaccaagatgaatctcttagtgtctag

SEQ ID NO: 777 - protein, 309 aa, Debaryomyces hansenii CBS767
MDNVKKKVYSALNYFHTDDDFNRVTFGLKRNALSARLVRWRFADLVLLGVLCVLYIVTYKIEPFQRQFFINDLTISHPFAESERVTNGALFFYSVWEPIMVIGVIGLIMTKPENKIYVTYVSILGLCISCFTTSVVTDVLKNLIGRHRPDFLARCVPRSDAPLNVMVFAKDVCTTDNLDLLKDGFRTTPSGHSSISFSGLVYLSLWLSGQLVIMNENLGYWRSILAWIPTLQCTYIALSRTEDYRHHFVDVIIGSLIGLGMACWAYRRLFPHITHPKSYEPYIIISEEEDNDNPDTQYNRINQDESLSV

SEQ ID NO: 778 - DNA, 855 bp, Candida albicans SC5314
  CDS (1)..(855): transl_table=12
atgacattcctcaacccatcctcaatagtaaaatacacacagagtaaccaatttcacgattttatccctgactggatagttgcaactgtaacggtattgtttttttttctggttgcagagacagcactcccatttcaacggcagttttcccttgatgatttgacaatttcccacccatttgcaattaaggaacgagtttcgggaatcttgtgtatagaaattgctgcatttgttccattatttgtaattttaacatcattattggtaaagtatcaacagggggcattttcttcacatcaacaagctttgcattgcttgcaaattagtgttttaggtttgataatatcattgagtttaaatggagtcatcactgatatacttaagatttggatagctagaccaagacccgatttcttggaacgttgtgggccagcaccgggaacaccattgcatgagttggtagacgtgaatgtttgtactgcacctttgggcaaagccttgttgattgatggtatgaaatcgacaccttctggtcattcttctattagttttggtgggttgttttatttaacattatggttattggggcaatttaagttattccagaatagagaatctccgcaatacgtttacaagtatttccttgcattttcaccattgtcattggccacatacattgcgttgagtagaacacaagattacagacaccattttactgatatagtgttaggaggagcaataggtatcagcttcgcttggtggtcgtatcatcattatttcaacaaacttgtttcagaggagtcacacaaacctatagattccgaaaccttaactgaactgttgttaccacattag

SEQ ID NO: 779 - protein, 284 aa, Candida albicans SC5314
MTFLNPSSIVKYTQSNQFHDFIPDWIVATVTVLFFFSVAETALPFQRQFSLDDLTISHPFAIKERVSGILCIEIAAFVPLFVILTSLLVKYQQGAFSSHQQALHCLQISVLGLIISLSLNGVITDILKIWIARPRPDFLERCGPAPGTPLHELVDVNVCTAPLGKALLIDGMKSTPSGHSSISFGGLFYLTLWLLGQFKLFQNRESPQYVYKYFLAFSPLSLATYIALSRTQDYRHHFTDIVLGGAIGISFAWWSYHHYFNKLVSEESHKPIDSETLTESLLPH

SEQ ID NO: 780 - DNA, 786 bp, Candida albicans SC5314
  CDS (1)..(786): transl_table=12
atgcttcaaatctactttacttcttccaaattcaggaaattcatacctgattggatagttgttatacttttggttataattttcttccaagttacagaagtagctcaaccatttgcacgacaattctatatcaacgatccaacaatttctcatccatttgcaacccaagaacaagtaaccgataaccaattatacctatattcagtgttaatccctagtcttataataagtttgatttcattgtatcttggagaatccaattttgaaaaattgcataatttacaagtatcttgtttaggactttggttaagtgtctgtgtcacttccgtgttgacagatgtgttaaaatgttggataagtaatcctcgacctgattttttagaaagatgtggaccacaaaagggaactcctgagaataaattggtgggaattgaagtttgtacttcaccattgggtccaatgtacttatctgatggattaaaatcaactccttcaggacattcttcaatggcattttcaggattattatacttgtcattatggttggttggacaatttaaattgattcaaaaacgtaaactgataggttatgttttgattgcaggattacctattttggtagcagcttatattgccttgagtagaactcaagattatcgtcatcattttttcgatattggttttggcagtgcaattggtattgtgtttgctgtgatattttattacaagtatttcaattcgttaagtgatgaaagttgtaatgtaccgatagattataaagattag

SEQ ID NO: 781 - protein, 261 aa, Candida albicans SC5314
MLQIYFTSSKFRKFIPDWIVVILLVIIFFQVTEVAQPFARQFYINDPTISHPFATQEQVTDNQLYLYSVLIPSLIISLISLYLGESNFEKLHNLQVSCLGLWLSVCVTSVLTDVLKCWISNPRPDFLERCGPQKGTPENKLVGIEVCTSPLGPMYLSDGLKSTPSGHSSMAFSGLLYLSLWLVGQFKLIQKRKSIGYVLIAGLPILVAAYIALSRTQDYRHHFFDIGFGSAIGIVFAVIFYYKYFNSLSDESCNVPIDYKD

SEQ ID NO: 782 - DNA, 921 bp, Candida albicans SC5314
  CDS (1)..(921): transl_table=12
atggcattatatgatattataaattatttttacggttctaattcaaaattcaatagaataacttgggggtttaaatcaccaacatttataaaatggagaatcactgattttatattaatcattgtattaattgtattattttttgtcacatcacaagcagaaccatttcatagacaattttatttaaacgatatgactattcaacatccatttgctgaacatgaacgagtcaccaatattcaattaggtctttatagtactgttatccctttatctgtaattatcattgttgccctaatttccacttgtcctcctaaatataaattatataatacttgggtttcaagcattggattattattaagtgtattaattacttcatttgttacaaatattgtgaaaaattggtttggtagattacgtcctgattttttggatcgttgtcaaccagcaaatgatactcccaaagataaattagtttcaattgaagtttgtacaacggataatttagatcgattagctgatggatttagaacaactccttcgggtcattcatcaattagttttgctgggttattttatttgacattatttttattgggtcaatcacaagctaataatggtaaaacaagtagttggagaactatgattagttttattccttggttaatggcttgttatattgcccttagtagaactcaagattatagacatcatttcattgatgtttttgtcgggagttgtttaggtttaatcattgccatttggcaatatttccgattattcccttggtttggtggtaatcaagcaaatgattcatttaataatagaattatgattgaagaaattaaaaggaaagaagaaattaaacaagatgaaaacaattatagaagaatatcagacatttccactaatgtgtga

SEQ ID NO: 783 - protein, 306 aa, Candida albicans SC5314
MALYDIINYFYGSNSKFNRITWGFKSPTFIKWRITDFILIIVLIVLFFVTSQAEPFHRQFYLNDMTIQHPFAEHERVTNIQLGLYSTVIPLSVIIIVALISTCPPKYKLYNTWVSSIGLLLSVLITSFVTNIVKNWFGRLRPDFLDRCQPANDTPKDKLVSIEVCTTDNLDRLADGFRTTPSGHSSISFAGLFYLTLFLLGQSQANNGKTSSWRTMISFIPWLMACYIALSRTQDYRHHFIDVFVGSCLGLIIAIWQYFRLFPWFGGNQANDSFNNRIMIEEIKRKEEIKQDENNYRRISDISTNV

SEQ ID NO: 784 - DNA, 873 bp, Arabidopsis thaliana
  CDS (1)..(873)
atgcctgaaattcatttgggtgctcatacaataagatcccatggagtaacagtcgcgaggttccacatgcatgactggctcattcttctgctgctaatagtcattgaaattgttcttaatgtcatcgaaccctttcatcgttttgttggagaagatatgctcactgatctcagataccctctgcaggacaacacaattcctttctgggctgtcccgttgatagctgttgtgctaccttttgctgtcatttgtgtttactacttcattagaaatgatgtttatgacctgcatcatgcaatactagggcttttgttctctgtacttataaccggtgtcataaccgatgctataaaggacgctgttggtcgacctcgtcctgatttcttttggcgttgtttccctgacggtatagggatctttcacaatgtcacgaagaatgttctatgtactggagctaaggatgtggtcaaagagggacacaagagcttccccagcggccacacatcttggtcgtttgctggtctaggatttctatcgttatacttgtctgggaaaatcagggtgtttgaccagagagggcatgttgcaaagctctgcattgtgattttacctctactggttgcagcattggttggtgtatccagagttgatgactattggcatcactggcaagatgtttttggaggagctatcataggattgactgtggccacattttgttatctgcaatttttccctcctccatacgatccagacggttggggacctcatgcctacttccagatgctggcagactcaagaaatgatgtccaagattcagcaggaatgaatcatctaagcgtgaggcaaacagagctagagagcgtacgttga

SEQ ID NO: 785 - protein, 290 aa, Arabidopsis thaliana
MPEIHLGAHTIRSHGVTVARFHMHDWLILLLLIVIEIVLNVIEPFHRFVGEDMLTDLRYPLQDNTIPFWAVPLIAVVLPFAVICVYYFIRNDVYDLHHAILGLLFSVLITGVITDAIKDAVGRPRPDFFWRCFPDGIGIFHNVTKNVLCTGAKDVVKEGHKSFPSGHTSWSFAGLGFLSLYLSGKIRVFDQRGHVAKLCIVILPLLVAALVGVSRVDDYWHHWQDVFGGAIIGLTVATFCYLQFFPPPYDPDGWGPHAYFQMLADSRNDVQDSAGMNHLSVRQTELESVR

SEQ ID NO: 786 - DNA, 942 bp, Oryza sativa
  CDS (1)..(942)
atgcgtggagagaatacggatgggaggagggaggttcagctgggccctcacacgattcagacacatggagttagattggccagaaatcacctgcatgattgggtcgttcttattttacttgctgcagttgtgattgccctgcatttcgctcctccatttagccggtttgttgggaaggatatgatgacttatgttagttacccggtgaaacaaagcactgtaccagcatggggtgttcctataatatccatagtttgccctgtaattatctttctatccgtttatatcgctaggagagatgtctatgatcttcatcacgcaacattaggtgtgctttactcggtgctgataactgcagttgtaactactgtggtaaagaatgcagtaggaagacctaggccagacttcttttggcggtgttttcctgatggaaagcagttatatgatcaagtgacaggtgatgtgatttgtcatggagagaaaagcttcttaaaggatggacgcaagagttttcctagtggacacacgtcgtggtcttttgctggacttggatttctgtcactctacctatctggcaaaattaaggtgtttgatcgccaaggtcatgttgccaaactttgcattatgattcttccccttcttattgcttcactcgtcgggatttctagaatagatgactatcgacaccactgggaggatgtgtttgctggcggcctactaggatttatcatggcgatgctctgttacttgcacttctttccacctccataccatcatcaaggttggggaccgtatgcatacttccatatgcttgaggagcttcaagtggccaactcccacaatgcagaaagccagcagtcagtgtgtgggcatcatgttgagctatctagactacacaatagcaggacatcaagaaatgatctggaagctggtcgtgtgtaa

SEQ ID NO: 787 - protein, 313 aa, Oryza sativa
MRGENTDGRREVQLGPHTIQTHGVRLARNHLHDWVVLILLAAVVIALHFAPPFSRFVGKDMMTYVSYPVKQSTVPAWGVPIISIVCPVIIFLSVYIARRDVYDLHHATLGVLYSVLITAVVTTVVKNAVGRPRPDFFWRCFPDGKQLYDQVTGDVICHGEKSFLKDGRKSFPSGHTSWSFAGLGFLSLYLSGKIKVFDRQGHVAKLCIMILPLLIASLVGISRIDDYRHHWEDVFAGGLLGFIMAMLCYLHFFPPPYHHQGWGPYAYFHMLEELQVANSHNAESQQSVCGHHVELSRLHNSRTSRNDLEAGRV

SEQ ID NO: 788 - DNA, 969 bp, Oryza sativa
  CDS (1)..(969)
atgccggcaccatcggcatccatccatctgggagttccaactccgtacataacatctcatggatccaaaattgctcgcctacacatgtatgactggattgtgctgattcttctagtcgtagtagatggaatactgaacataatagaaccattccatcgatttgttggatcggatatgatgacagacctcagataccccatgaaagacaacacagtcccattttgggcggtcccgataattggtatcattggaccaatgattatcatcactggaatatacttcaagaagaggaatgtgtatgatttccatcatgccatactaggtctcctattttcagttcttatcacggcggtaataactgatgccattaaagatggggttggtcgaccgcgtccagatttcttttggcgctgttttcctgacggagtacctgcttatgataatttcactacaggagtgctttgtcatggtaaggcgagcgttatcaaagaaggtcacaagagttttccgagtggccatacttcttggtcttttgctggccttggtttcctgtcatggtatctggctggtaaaataaaagtttttgacagaagaggccatgttgcaaaactctgcattattattctccctctgctccttgcagccttggttgctgtttctcgggtagatgactattggcatcattggcaagatgtgttcaccggtggaattttggggttggtggtttcttcattttgctacctccaattttttccaatgccatctgatgaaaacggattatggcctcacgcatacgcccggcacattctcaaccctgatcagctggagaacaacgcgcaacccacgtccgtggatcgccctaactctctgccgaacgggtcctttagaagccctaatggattggaaatgggaaacacgggccaaggccaagcattagatttcatggaagctggtcgtagatatcaataa

SEQ ID NO: 789 - protein, 322 aa, Oryza sativa
MPAPSASIHLGVPTPYITSHGSKIARLHMYDWIVLILLVVVDGILNIIEPFHRFVGSDMMTDLRYPMKDNTVPFWAVPIIGIIGPMIIITGIYFKKRNVYDFHHAILGLLFSVLITAVITDAIKDGVGRPRPDFFWRCFPDGVPAYDNFTTGVLCHGKASVIKEGHKSFPSGHTSWSFAGLGFLSWYLAGKIKVFDRRGHVAKLCIIILPLLLAALVAVSRVDDYWHHWQDVFTGGILGLVVSSFCYLQFFPMPSDENGLWPHAYARHILNPDQLENNAQPTSVDRPNSLPNGSFRSPNGLEMGNTGQGQALDFMEAGRRYQ

SEQ ID NO: 790 - DNA, 1140 bp, Oryza sativa
  CDS (1)..(1140)
atgccgccaccgccgccggcgacgtcgccggcgccggcagccattcggctgggagccccgcacccgtacctgagaacccacgggaccaaggtcgcgaggctgcacctgctcgactggatcgtgctggccctcctcgtcgccatcgacgccggcctcaacctgatcgagccgttccaccggttcgtcggagaagacatgatgatcagcctccggtacccgctcaagcgcaacaccgtccccatctgggccgtccccatatatgctgtcgctgggccgatgatcatcttcattgtgatatacatgaagaggaggaatgtgtatgacctgcatcatgcgatcctagggcttctgttttctgtgctgatcactgccgtcctgaccgacgcgatcaaggatggcgttggccggcctcgcccgaatttcttctggcgatgctttcctgacgggatcccgaagtacaacaacatcaccagaggtgtcatctgccatggggataaaagtgtcatcaaagaagggcacaagagcttcccaagtggccatacctcatggtcttttgccggattaggcttcctgtcatggtacctggccggcaagatcaaggcgttcgacagaggagggcatgtggccaagctctgcattgtcgtcttgcctctgcttattgcagcgatggttggggtctcaagggtggatgactactggcaccattggcaggacgtgtttaccggtggaattcttggattggtggttgcttccttctgctaccttcagttcttcccaccacctgctggtgaacaaggcggcggcgagcacgatcttcatggacctcgaggctgggcgtccaccgaagccgagctcaccgatggcggtgcgctggcggcggaggaaggagttgaggtgcgagatgccattgtcgaacctgtcaatggcggttggggaggaggaagaggcaaagatgtggcggcagtggtgagggtttgcggcggaggattttggcctcatgcatactttgagcacattcttcacccagaagttgagaaccaggtgcagctaacagctacttcaaatcatcatcaaggcctggacatgagaaccaacaaccagtcattagattccatggaagaaggccgaagagctcggtga

SEQ ID NO: 791 - protein, 379 aa, Oryza sativa
MPPPPPATSPAPAAIRLGAPHPYLRTHGTKVARLHLLDWIVLALLVAIDAGLNLIEPFHRFVGEDMMISLRYPLKRNTVPIWAVPIYAVAGPMIIFIVIYMKRRNVYDLHHAILGLLFSVLITAVLTDAIKDGVGRPRPNFFWRCFPDGIPKYNNITRGVICHGDKSVIKEGHKSFPSGHTSWSFAGLGFLSWYLAGKIKAFDRGGHVAKLCIVVLPLLIAAMVGVSRVDDYWHHWQDVFTGGILGLVVASFCYLQFFPPPAGEQGGGEHDLHGPRGWASTEAELTDGGALAAEEGVEVRDAIVEPVNGGWGGGRGKDVAAVVRVCGGGFWPHAYFEHILHPEVENQVQLTATSNHHQGLDMRTNNQSLDSMEEGRRAR

SEQ ID NO: 792 - DNA, 924 bp, Oryza sativa
  CDS (1)..(924)
atggcagatgtcttaggatgttacactataaagtcccatggaaccaaagtggcgagacttcacatgtacgactggataatacttctactccttgctgttatagatggactgttgaacataattgaaccttttcaccgtttcgtcgggagggacatgatgactgacttgagatatccattgaagggcaatactgttcccttctgggctgttccgctcattggaattgtattgccttgtgccatctttggtggaatttacttcaaaaagaagaatttctatgatttgcaccatggcatactggggatcctatactctgtgcttataactgcggtaatcacagatgcaattaaggatggtgtgggtcgtccacgcccagattttttctggcgctgtttcccagatggaaaggatgtttatgataatgtcactactggtgtcatatgccatggagagaagagtgtcatcaaagaaggtcacaagagctttccaagcgggcactcttcatggtcttttgctggtctaggcttccttgcatggtacttagctgggaagatcacagtttttgatcgtagaggtcatgttgcaaagctatgcatagtatttctgcctcttcttactgctgcacttgtggctgtttctcgagtggatgactactggcatcactggcaggatgtatttgcaggctctctgataggtcttacagtcgcatcattttgttatctgcaattcttcccatatccttatgacgcagacgctttctggcctcatgcatacaccttccagctagcggaggcctcgcgcaacaataacaccgcaaactcctacagcgtgagaccgaccgggttcgagactgtcaatgtcccagaagggcatggtgggattgctctgagagacaccaacctagaggccggcaggagaccgtga

SEQ ID NO: 793 - protein, 307 aa, Oryza sativa
MADVLGCYTIKSHGTKVARLHMYDWIILLLLAVIDGLLNIIEPFHRFVGRDMMTDLRYPLKGNTVPFWAVPLIGIVLPCAIFGGIYFKKKNFYDLHHGILGILYSVLITAVITDAIKDGVGRPRPDFFWRCFPDGKDVYDNVTTGVICHGEKSVIKEGHKSFPSGHSSWSFAGLGFLAWYLAGKITVFDRRGHVAKLCIVFLPLLTAALVAVSRVDDYWHHWQDVFAGSLIGLTVASFCYLQFFPYPYDADAFWPHAYTFQLAEASRNNNTANSYSVRPTGFETVNVPEGHGGIALRDTNLEAGRRP

SEQ ID NO: 794 - DNA, 933 bp, Zea mays
  CDS (1)..(933)
atgcctgatatccagctgggatgccacactataaggtcccatggtaccaaagtggcaacattacacatgtatgactggattatacttttatgtcttgctgtacttgatggactgttaaacataatcgagccctttcaccgctttgttggacgcgacatgatgaccgacttgagttatcccctcaagggcaacacaatcccattttgggctgttccactgattgcgatcgtgctacccttggttatctttgctgtcatttacttcaaaaagaaaaatgtctatgatttacaccacggcatactaggtatcttgtattcagtgcttataactgctgtgatcactgatgcaattaaggatggtgttggtcgccctcggccagatttcttttggcgttgttttcctgatggcaaacctaattttaataatataaccaccgatgtgatatgccatggagaaaagagtgtcatcaaggaaggtcataagagtttcccaagtgggcattcttcatggtctttcgctggtctaggttttcttgcatggtacttggctggaaaacttaaagcttttgatcgcaagggtcacattgcaaaactgtgcttagtttttctgcctctacttgtcgcgtcacttgtggctgtttctcgagttgatgattactggcatcactggcaagatgtctttgccggcggcatcataggtcttacagttgcttcattctgttacctgcagttcttcccatatccctttgacaatgatgccctatggccacacgcatacttccaacagctagctgagacacacagtaatggtaatgcaaactcaatcaacataagacctacagagtttgaagatgaaccagatgaccatggtgacattgtcctgagggacaccagccctatcttggagtcaatggagtctggcaggagaccatga

SEQ ID NO: 795 - protein, 310 aa, Zea mays
MPDIQLGCHTIRSHGTKVATLHMYDWIILLCLAVLDGLLNIIEPFHRFVGRDMMTDLSYPLKGNTIPFWAVPLIAIVLPLVIFAVIYFKKKNVYDLHHGILGILYSVLITAVITDAIKDGVGRPRPDFFWRCFPDGKPNFNNITTDVICHGEKSVIKEGHKSFPSGHSSWSFAGLGFLAWYLAGKLKAFDRKGHIAKLCLVFLPLLVASLVAVSRVDDYWHHWQDVFAGGIIGLTVASFCYLQFFPYPFDNDALWPHAYFQQLAETHSNGNANSINIRPTEFEDEPDDHGDIVLRDTSPILESMESGRRP

SEQ ID NO: 796 - DNA, 972 bp, Brassica napus
  CDS (1)..(972)
atggtctttggatcgttcttctcttctctcaagttctggggaaattctcaggaacaagagccgcagagagggaggatgcaggagatagatcttggtatccacacaataaggagccatggagtcggcgtcgcctctaaacacaaacacgactggattatactcgtgatcttggtggccatcgagatcggtttgcagctcatatctcctttctacagatacgttgggagagacatgatgactgatcttaaatacccttttaacgacaacaccgttcctgtctggtcagtaccaatctacgctgtgctgctcccgatcatagtgttcgtctgtttctacatgaagagaacatgcgtgtacgatcttcaccacagcattctcgggctgctcttcaccgtcttgataactggtatcatcactgactccatcaagctcgccacgggacgccctcgtcctaacttctactggcgttgcttccctgacgggaatgaggtttacaacgcgttgggtggtgtgatatgccatggtaaaccaggagaggttaaagaaggtcacaaaagcttcccgagtggacacacgtcttggtctttcgcgggacttggttacctttcgctgtacttatctggtaaagtcaaggcctttaacagagaagggcatgtggctaagctctgcattgtgtttgctcctctcctcgcggcttgtctcgtggggatatcgcgtgtggatgactactggcatcattggcaagacgtctttgctggagctcttattggcctctttgtggctgccttttgttaccgtcagttttatcctaatccttaccatgaagaagggtggggtccttatgcttatttcagagcggcgcaggagcgtggacaagcgcagaatggagatgtgttgaggacaatgtctttgcaggtggaaccaccttctcttgaaaacatggagtctggcacttcatctgttcgaagatga

SEQ ID NO: 797 - protein, 323 aa, Brassica napus
MVFGSFFSSLKFWGNSQEQEPQRGRMQEIDLGIHTIRSHGVGVASKHKHDWIILVILVAIEIGLQLISPFYRYVGRDMMTDLKYPFNDNTVPVWSVPIYAVLLPIIVFVCFYMKRTCVYDLHHSILGLLFTVLITGIITDSIKLATGRPRPNFYWRCFPDGNEVYNALGGVICHGKPGEVKEGHKSFPSGHTSWSFAGLGYLSLYLSGKVKAFNREGHVAKLCIVFAPLLAACLVGISRVDDYWHHWQDVFAGALIGLFVAAFCYRQFYPNPYHEEGWGPYAYFRAAQERGQAQNGDVLRTMSLQVEPPSLENMESGTSSVRR

SEQ ID NO: 798 - DNA, 969 bp, Glycine max
  CDS (1)..(969)
atgccagaaattcagttgggtatgcatactatcagatcacatggaactagagtggcaaggacacatatgcatgactggttgattcttttgcttcttgtgatcatcgatgctgtcttgaatataatacagccatttcaccgttttgttggagaggggatgatgacagaccttagatacccattgaaagctaatacaattcccttttgggctgttccgataatagcaatattgttaccactggctgtttttctcgtttactatttcattcgtaaggatgtctatgacctccaccatgctataatgggccttctattttctgtactcattactgcggtgatgactgatgctatcaaggatgctgttggacggccaaggccagacttcttctggcgttgtttccctgatggaaaaggggtgtttgatccagtaacaagtaatgttctgtgtactggagataagggtgttattaaggaagggcacaaaagtttccccagtggacatacctcttggtcatttgctggtcttgtttatcttgcttggtatctatctggaaaactcagggcatttgaccgcagggggcatgttgcaaagctctgtcttgttttcttaccattcctcgtggcagctatgattgctgtctctcgtgttgatgattactggcatcattggcaagatgtgtttgctggagctcttatagggatgataattgcttcattttgttacttacaattctttccacctccatatgacgtagatggttggggacctcatgcatatttccagatgttggctgaatctcgtaatggtgctcagccctctactgtcaataatgagattcatcatgtgcaatctgctgagcttcaggctgtatctttgtatatcccacctcaacatgatgcagatacacgaggcaatagctgggattcaagccccatgttaggtgcatcccaaaatgtaagaacacactga

SEQ ID NO: 799 - protein, 322 aa, Glycine max
MPEIQLGMHTIRSHGTRVARTHMHDWLILLLLVIIDAVLNIIQPFHRFVGEGMMTDLRYPLKANTIPFWAVPIIAILLPLAVFLVYYFIRKDVYDLHHAIMGLLFSVLITAVMTDAIKDAVGRPRPDFFWRCFPDGKGVFDPVTSNVLCTGDKGVIKEGHKSFPSGHTSWSFAGLVYLAWYLSGKLRAFDRRGHVAKLCLVFLPFLVAAMIAVSRVDDYWHHWQDVFAGALIGMIIASFCYLQFFPPPYDVDGWGPHAYFQMLAESRNGAQPSTVNNEIHHVQSAELQAVSLYIPPQHDADTRGNSWDSSPMLGASQNVRTH

SEQ ID NO: 800 - DNA, 933 bp, Zea mays
  CDS (1)..(933)
atggcagaccagttagggtcttacactattagatcccatggaatgatattggcaaggttgcacatgtatgactggataatacttctcctccttgctgtcatagacgggctgttgaatataattgaaccatttcaccgttttgttgggaaagacatgatgactgacttgagatatcctatgaagggcaatacagtgccattttgggctgttccactgattggaattatactgccttgggccatctttgttgggatttacttcaaaaagaagaatttttatgatttgcaccatggcatactggggattctatactcagtgctgataactgcagtgattactgatgcaattaaggatggtgttggacggcctcgtccagattttttctggcgctgtttccctaatggaaatgatgtttatgataacattactactggtgttatatgcaatggagtgaagagcgtaatcaaggaaggccacaagagctttcccagtggacacagttcatggtcttttgctggtctaggcttccttgcatggtacttagctgggaaactcacagcctttgaccgcaaagggcatattgcgaagctatgcattgtgttcctgcctctccttactgctgcacttgtggctgtttctcgagtggacgactactggcatcattggcaagatgtatttgcagggggtcttataggtcttacagttgcttcgttttgctacctacagtttttcccatatcctttcgatggcgatgctttgtggcctcacgcatacgcggtccggttagccgaggaggggaacagcagaaatgcgaactcatacagcgtgagaccaaccgagatcgaaacagtcgatattcctgggcacggtgggatcatcaccctaagagatactctaaacgatgtggagtctggcagtgccaggagattgtga

SEQ ID NO: 801 - protein, 310 aa, Zea mays
MADQLGSYTIRSHGMILARLHMYDWIILLLLAVIDGLLNIIEPFHRFVGKDMMTDLRYPMKGNTVPFWAVPLIGIILPWAIFVGIYFKKKNFYDLHHGILGILYSVLITAVITDAIKDGVGRPRPDFFWRCFPNGNDVYDNITTGVICNGVKSVIKEGHKSFPSGHSSWSFAGLGFLAWYLAGKLTAFDRKGHIAKLCIVFLPLLTAALVAVSRVDDYWHHWQDVFAGGLIGLTVASFCYLQFFPYPFDGDALWPHAYAVRLAEEGNSRNANSYSVRPTEIETVDIPGHGGIITLRDTLNDVESGSARRL

SEQ ID NO: 802 - DNA, 930 bp, Zea mays
  CDS (1)..(930)
atggcagaccagttagggtcttacacaattagatcccatggaatgatattggcaagattacacatgtatgactggataatacttctcctccttgctgtcatagacgggctgttgaatataattgaaccatttcaccgttttgttggaaaagacatgatgaccgacttgagatatcctatgaagggcaatacagtgccattttgggctgttccactgattggaattatactgccttgggccatctttgttggaatttacttcaagaagaacaatttttatgatctgcaccatggcatactggggattctatactcagtgctcataactgcagtgattactgatgcaattaaggatggtgttggacggcctcgtccagattttttctggcgctgtttccctgatggaaatgatgtttatgataacatcactactggtgttatatgcaatggagtgaagagcgtaatcaaggaaggccacaagagctttcccagtggacacacttcatggtcttttgctggtctaggcttccttgcatggtacttagctgggaaactcacggcttttgatcgcaaaggacatattcggaagctatgcattgtgtttctgcctcttcttactgctgcgcttgtggctgtttctcgagtggatgactactggcatcattggcaagatgtatttgcagggggtcttataggtcttacagttgcttcattttgctatctacagttttttccatatccttttgatggcgatgctttgtggcctcacgcatacactgtccagttagccgaggaagggagcagcagaaatacaaactcctacagcgtgagaccagccgagatcgaaacagtcaatattcctggtcacggtgggatcaccctaagagatactctaaatgatatggagtctggtagcggcaggagattgtga

SEQ ID NO: 803 - protein, 309 aa, Zea mays
MADQLGSYTIRSHGMILARLHMYDWIILLLLAVIDGLLNIIEPFHRFVGKDMMTDLRYPMKGNTVPFWAVPLIGIILPWAIFVGIYFKKNNFYDLHHGILGILYSVLITAVITDAIKDGVGRPRPDFFWRCFPDGNDVYDNITTGVICNGVKSVIKEGHKSFPSGHTSWSFAGLGFLAWYLAGKLTAFDRKGHIRKLCIVFLPLLTAALVAVSRVDDYWHHWQDVFAGGLIGLTVASFCYLQFFPYPFDGDALWPHAYTVQLAEEGSSRNTNSYSVRPAEIETVNIPGHGGITLRDTLNDMESGSGRRL

SEQ ID NO: 804 - DNA, 900 bp, Zea mays
  CDS (1)..(900)
atggcagaccagttagggtcttacacaattagatcccatggaatgatattggcaagattacacatgtatgactggataatacttctcctccttgctgtcatagacgggctgttgaatataattgaaccatttcaccgttttgttggaaaagacatgatgaccgacttgagatatcctatgaagggcaatacagtgccattttgggctgttccactgattggaattatactgccttgggccatctttgttggaatttacttcaagaagaacaatttttatgatctgcaccatggcatactggggattctatactcagtgctcataactgcagtgattactgatgcaattaaggatggtgttggacggcctcgtccagtttttttctggcgctgtttccctgatggaaatgatgtttatgataacatcactactggtgttatatgcaatggagtgaagagcgtaatcaaggaaggccacaagagctttcccagtggacacacttcatggtcttttgctggtctaggcttccttgcatggtacttagctgggaaactcacggcttttgatcgcaaaggacatattcggaagctatgcattgtgtttctgcctcttcttactgctgcgcttgtggctgtttctcgagtggatgactactggcatcattggcaagatgtatttgcagggggtcttataggtcttacagttgcttcattttgctatctacagttttttccatatccttttgatggcgatgctttgtggcctcacgcatacactgtccagttagccgaggaagggagcagcagaaatacaaactcctacagcgtgagaccagccgagatcgaaacagtcaatattcctggtcacggtgggatcacccctaagagatactctaaatga

SEQ ID NO: 805 - protein, 299 aa, Zea mays
MADQLGSYTIRSHGMILARLHMYDWIILLLLAVIDGLLNIIEPFHRFVGKDMMTDLRYPMKGNTVPFWAVPLIGIILPWAIFVGIYFKKNNFYDLHHGILGILYSVLITAVITDAIKDGVGRPRPVFFWRCFPDGNDVYDNITTGVICNGVKSVIKEGHKSFPSGHTSWSFAGLGFLAWYLAGKLTAFDRKGHIRKLCIVFLPLLTAALVAVSRVDDYWHHWQDVFAGGLIGLTVASFCYLQFFPYPFDGDALWPHAYTVQLAEEGSSRNTNSYSVRPAEIETVNIPGHGGITPKRYSK

SEQ ID NO: 806 - DNA, 963 bp, Zea mays
  CDS (1)..(963)
atgccagcaccagccccaccaattcgtctgggacctccgactccctatatatcctctcatggatccaaagttgcacgcctacacatgtatgactggattgtgctaattcttttagctgtattggatggagttcttaatataatagaacccttccatcgcttcgtcggatcagaaatgatgacagacctcagataccccatgaagggcaatacagtgccattttgggctgtgccgataattggtatcattgggcctatggttatcataacagtgatatactttaagaagagaaatgtatatgatctgcatcatgccatactaggtctcctattttcagtacttattactgctgttttaactgatgcgataaaggatggtgttgggcgaccacgtcctgatttcttctggcgttgcttccctgatggaaaacctgagtataacaactttactacaggcgccatatgccatggccaggcgagtgttattaaagaaggtcataaaagctttccaagtggtcatacttcatggtcttttgctggccttgggttcctttcatggtatttggctggtaaaatcaaagtattcgatcgtagaggacatgttgcaaaagtctgcattgtcctttcccctctgcttcttgcagccttagtggcagtttctcgagttgatgactattggcatcattggcaagacgtatgtactggcggattacttgggttcacggttgcttccatttgctacctgcagttttttccactaccatctgatgaaaatggactgtggccgcacgcatatttccgacacattcttgagccagagggtgacagccaagcgcaacccacgtacatgagccgtcgcagctcggttcagaacggttcctttcagtacagccctgacgcagtggaaatgaggagcacgagccaagcaatggattccatggaagctggccagagagcccaataa

SEQ ID NO: 807 - protein, 320 aa, Zea mays
MPAPAPPIRLGPPTPYISSHGSKVARLHMYDWIVLILLAVLDGVLNIIEPFHRFVGSEMMTDLRYPMKGNTVPFWAVPIIGIIGPMVIITVIYFKKRNVYDLHHAILGLLFSVLITAVLTDAIKDGVGRPRPDFFWRCFPDGKPEYNNFTTGAICHGQASVIKEGHKSFPSGHTSWSFAGLGFLSWYLAGKIKVFDRRGHVAKVCIVLSPLLLAALVAVSRVDDYWHHWQDVCTGGLLGFTVASICYLQFFPLPSDENGLWPHAYFRHILEPEGDSQAQPTYMSRRSSVQNGSFQYSPDAVEMRSTSQAMDSMEAGQRAQ

SEQ ID NO: 808 - DNA, 27 bp, Artificial sequence
  primer
atgaacagagtttcgtttattaaaacg

SEQ ID NO: 809 - DNA, 25 bp, Artificial sequence
  primer
ttacataccttcatcggacaaagga

SEQ ID NO: 810 - protein, 311 aa, Artificial sequence
  consensus sequence
  Variant (2)..(19): Xaa in position 2 to 19 is any amino acid
  Variant (22)..(22): Xaa in position 22 is any amino acid
  Variant (24)..(30): Xaa in position 24 to 30 is any amino acid
  Variant (32)..(41): Xaa in position 32 to 41 is any amino acid
  Variant (43)..(54): Xaa in position 43 to 54 is any amino acid
  Variant (56)..(76): Xaa in position 56 to 76 is any amino acid
  Variant (77)..(86): Xaa in position 77 to 86 is any or no amino acid
  Variant (89)..(91): Xaa in position 89 to 91 is any amino acid
  Variant (93)..(95): Xaa in position 93 to 95 is any amino acid
  Variant (97)..(99): Xaa in position 97 to 99 is any amino acid
  Variant (101)..(103): Xaa in position 101 to 103 is any amino acid
  Variant (105)..(107): Xaa in position 105 to 107 is any amino acid
  Variant (110)..(110): Xaa in position 110 is any amino acid
  Variant (115)..(116): Xaa in position 115 to 116 is any amino acid
  Variant (119)..(119): Xaa in position 119 is any amino acid
  Variant (121)..(121): Xaa in position 121 is any amino acid
  Variant (122)..(122): Xaa in position 122 is any or no amino acid
  Variant (124)..(134): Xaa in position 124 to 134 is any amino acid
  Variant (135)..(135): Xaa in position 135 is any or no amino acid
  Variant (137)..(145): Xaa in position 137 to 145 is any amino acid
  Variant (146)..(147): Xaa in position 146 to 147 is any or no amino acid
  Variant (149)..(152): Xaa in position 149 to 152 is any amino acid
  Variant (157)..(157): Xaa in position 157 is any amino acid
  Variant (159)..(159): Xaa in position 159 is any amino acid
  Variant (165)..(166): Xaa in position 165 to 166 is any amino acid
  Variant (168)..(170): Xaa in position 168 to 170 is any amino acid
  Variant (172)..(172): Xaa in position 172 is any amino acid
  Variant (174)..(192): Xaa in position 174 to 192 is any amino acid
  Variant (193)..(195): Xaa in position 193 to 195 is any or no amino acid
  Variant (199)..(199): Xaa in position 199 is any amino acid
  Variant (201)..(203): Xaa in position 201 to 203 is any amino acid
  Variant (205)..(205): Xaa in position 205 is any amino acid
  Variant (208)..(209): Xaa in position 208 to 209 is any amino acid
  Variant (212)..(212): Xaa in position 212 is any amino acid
  Variant (215)..(216): Xaa in position 215 to 216 is any amino acid
  Variant (219)..(220): Xaa in position 219 to 220 is any amino acid
  Variant (222)..(224): Xaa in position 222 to 224 is any amino acid
  Variant (226)..(228): Xaa in position 226 to 228 is any amino acid
  Variant (230)..(232): Xaa in position 230 to 232 is any amino acid
  Variant (234)..(236): Xaa in position 234 to 236 is any amino acid
  Variant (239)..(247): Xaa in position 239 to 247 is any amino acid
  Variant (248)..(310): Xaa in position 248 to 310 is any or no amino acid
DXXXXXXXXXXXXXXXXXXPFXRXXXXXXXTXXXXXXXXXXVXXXXXXXXXXXXPXXXXXXXXXXXXXXXXXXXXXXXXXXXXXXXLGXXXSXXXTXXXTXXXKXXXGRXRPDFXXRCXPXXGXXXXXXXXXXXXCXXXXXXXXXXXGXXXXPSGHXSXSFAGLXXLXXXLXGXXXXXXXXXXXXXXXXXXXXXXPLLXAXXXAXSRXXDYXHHXXDVXXGXXXGXXXAXXXYXXXFPXXXXXXXXXXXXXXXXXXXXXXXXXXXXXXXXXXXXXXXXXXXXXXXXXXXXXXXXXXXXXXXXXXXXXXXXP

SEQ ID NO: 811 - protein, 39 aa, Artificial sequence
  protein pattern
  Variant (2)..(2): Xaa in position 2 is any or no amino acid
  Variant (4)..(6): Xaa in position 4 to 6 is any or no amino acid
  Variant (9)..(9): Xaa in position 9 is any amino acid
  Variant (10)..(10): Xaa in position 10 is Asp, Glu or Gln
  Variant (13)..(13): Xaa in position 13 is any amino acid
  Variant (16)..(16): Xaa in position 16 is Phe or Trp
  Variant (17)..(17): Xaa in position 17 is any amino acid
  Variant (19)..(19): Xaa in position 19 is Ile or Val
  Variant (20)..(21): Xaa in position 20 to 21 is any amino acid
  Variant (23)..(23): Xaa in position 23 is Ala, Gly or Ser
  Variant (24)..(24): Xaa in position 24 is any amino acid
  Variant (25)..(25): Xaa in position 25 is Ile or Leu
  Variant (27)..(28): Xaa in position 27 to 28 is any amino acid
  Variant (29)..(29): Xaa in position 29 is Phe, Ile, Met or Val
  Variant (31)..(33): Xaa in position 31 to 33 is any amino acid
  Variant (35)..(37): Xaa in position 35 to 37 is any amino acid
  Variant (38)..(38): Xaa in position 38 is Phe or Tyr
  Variant (39)..(39): Xaa in position 39 is Asn or Pro
AXLXXXSRXXDYXHHXXDXXXGXXXGXXXAXXXYXXXXX

SEQ ID NO: 812 - protein, 26 aa, Artificial sequence
  protein pattern
  Variant (2)..(5): Xaa in position 2 to 5 is any amino acid
  Variant (10)..(10): Xaa in position 10 is Ser or Thr
  Variant (12)..(12): Xaa in position 12 is any amino acid
  Variant (15)..(15): Xaa in position 15 is Ala or Ser
  Variant (18)..(18): Xaa in position 18 is Gly, Leu or Val
  Variant (19)..(19): Xaa in position 19 is Phe or Tyr
  Variant (21)..(22): Xaa in position 21 to 22 is any amino acid
  Variant (23)..(23): Xaa in position 23 is Phe, Trp or Tyr
  Variant (25)..(25): Xaa in position 25 is Ala, Cys, Ser or Val
GXXXXPSGHXSXSFXGLXXLXXXLXG

SEQ ID NO: 813 - protein, 32 aa, Artificial sequence
  protein pattern
  Variant (2)..(6): Xaa in position 2 to 6 is any amino acid
  Variant (7)..(7): Xaa in position 7 is any or no amino acid
  Variant (9)..(9): Xaa in position 9 is Ala, Gly or Ser
  Variant (10)..(10): Xaa in position 10 is Phe, Ile, Leu or Val
  Variant (11)..(11): Xaa in position 11 is Phe, Ile, Leu, Met or Val
  Variant (13)..(13): Xaa in position 13 is Asp, Asn or Thr
  Variant (14)..(14): Xaa in position 14 is any amino acid
  Variant (15)..(15): Xaa in position 15 is Ile, Leu or Val
  Variant (17)..(17): Xaa in position 17 is any amino acid
  Variant (18)..(19): Xaa in position 18 to 19 is any or no amino acid
  Variant (22)..(22): Xaa in position 22 is any amino acid
  Variant (25)..(25): Xaa in position 25 is Asp, Asn or Val
  Variant (26)..(26): Xaa in position 26 is Phe or Leu
  Variant (27)..(28): Xaa in position 27 to 28 is any amino acid
  Variant (31)..(31): Xaa in position 31 is any amino acid
LXXXXXXTXXXTXXXKXXXGRXRPXXXXRCXP

SEQ ID NO: 814 - DNA, 408 bp, Saccharomyces cerevisiae
  CDS (1)..(408)
atgtttaatgtcctattacttccaaaattaattagtttttccaacgaaatagccttgttggcgcaatcggtagcgcgtatgactcttaatcataaggttaggggttcgagccccctacagggctatcttttttttaaacaacatccacactttattgtggtcattgtgatattcttaagaaacttttatttcatctatgatatttttttttacgtatacattataaatcatcaaactcatgtggcattctccgcgccctttgatatttccccctcgttatactcattcgaccggtccgcttgcgatgactggtttggctcatcttttggctcatttgcatcttcagccagctcgctacaaaccttggatccgaaatggtgctcaaccatgtgttccacagcaacatag

SEQ ID NO: 815 - protein, 135 aa, Saccharomyces cerevisiae
MFNVLLLPKLISFSNEIALLAQSVARMTLNHKVRGSSPLQGYLFFKQHPHFIVVIVIFLRNFYFIYDIFFYVYIINHQTHVAFSAPFDISPSLYSFDRSACDDWFGSSFGSFASSASSLQTLDPKWCSTMCSTAT

SEQ ID NO: 816 - DNA, 27 bp, Artificial sequence
  primer
atgtttaatgtcctattacttccaaaa

SEQ ID NO: 817 - DNA, 24 bp, Artificial sequence
  primer
ctatgttgctgtggaacacatggt

SEQ ID NO: 818 - DNA, 2571 bp, Saccharomyces cerevisiae
  CDS (1)..(2571)
atgtcccgtgaagtactgccaaacaacgttaccccattgcattatgacattacactagaacctaatttccgtgcttttacgtttgaagggtcattaaaaattgacctgcagattaatgatcattcgataaactctgtgcaaataaattacttagaaatagatttccattctgcacgtattgagggtgtcaatgccattgaagttaacaaaaacgaaaaccaacaaaaagctactcttgtctttcctaatggaacttttgaaaacctaggaccttctgcgaagttagaaattatcttttccggtattctaaatgatcagatggcgggattttacagggctaagtatacggataaagtcacaggggagacgaagtacatggctactactcagatggaagccacagatgctagaagagcctttccttgttttgacgaaccaaatttgaaggcgacttttgcagtaactttggtctctgaatcgtttctgactcatttgtccaacatggatgtcaggaatgaaacaatcaaagagggtaagaaatatacaacttttaacacgactccaaagatgtctacgtacttagtagcatttattgtagctgacctgagatacgtggaaagcaataatttccgtattccagtaagagtttattctaccccaggggacgaaaaatttggtcagtttgcagccaatttagctgctaggaccttgagattctttgaggacaccttcaacatagaatatccattgccaaagatggatatggtggcagttcatgagttttctgctggtgctatggaaaactgggggctagtgacttatagagttattgatttgttattagacatagaaaattcgagtttagatcgcattcaaagagttgctgaggttattcagcatgaactagcccaccaatggttcggcaacttggtcaccatggattggtgggaaggcttatggttgaatgaaggttttgccacttggatgtcttggtactcttgcaacaagtttcaaccagaatggaaagtttgggagcaatatgttactgacaatttacaacgtgctctaaatttagattcattaagatcttcccatccaattgaagttcccgttaataatgcggacgaaatcaatcaaatttttgatgctatttcttattctaaaggatcttctttattgaggatgatttccaaatggttgggtgaagagacttttattaaaggtgtgtcccaatacctgaataaattcaaatacggtaatgcaaagaccggagatttgtgggacgccttagcagatgcctctggcaaggacgtttgttcggtgatgaacatctggacaaaacgtgttggttttccagtgttatctgtcaaggaacacaagaacaaaatcacattaactcaacaccgttatttaagtaccggtgatgttaaagaagaggaagatacaaccatataccccattttgttagctttgaaagacagtacaggtatcgataacacattggtattgaacgaaaaatctgctactttcgaattaaagaatgaagagttcttcaagattaatggtgaccaatctggtattttcattacctcttattctgacgaaagatgggctaagctatccaaacaggcaaatttattatccgtagaggatcgtgttggcttagtcgcagatgcaaaagccctttctgcatctggctatacctctactactaacttcttgaatttaatttctaattggaaaaacgaggattcatttgttgtttgggaacaaatcattaatagtttatccgctctgaaatctacttgggtcttcgaaccagaggatatattgaatgctctagataaatttactttggatctagtacttaacaaactttctgaattggggtggaatattggcgaagacgactcctttgctatccaacgtttaaaagtgacccttttcagtgccgcatgcacttctggcaatgaaaaaatgcaatcgattgcggtagaaatgtttgaggaatacgccaatgggaacaaacaggccatacctgcactgttcaaggcagttgttttcaacaccgttgccagacttggcggagaaaacaattacgaaaagattttcaacatctatcaaaaccctgtttcgtcagaagaaaagattatcgctttgagagctttgggcagatttgaagacaaagaacttttagaaaggacattgtcttatctgctagatggtacagttttgaatcaagatttttacatcccaatgcaaggcattagagttcataagaagggtattgaaaggttatgggcttggatgcaagaacactgggacgaaattgctaagagattacagccaggctcgcctgtgttgggtggcgtgttgacattgggtttaactaattttacctcttttgaagcccttgaaaaaattagtgcgttctatagtagaaaggtcactaaaggttttgatcaaaccctggctcaagccttagacactattagatccaaggcgcaatgggtgagcagagatcgtgaaatcgttgctacctacttgcgtgagcatgagtatgatcaatag

SEQ ID NO: 819 - protein, 856 aa, Saccharomyces cerevisiae
MSREVLPNNVTPLHYDITLEPNFRAFTFEGSLKIDLQINDHSINSVQINYLEIDFHSARIEGVNAIEVNKNENQQKATLVFPNGTFENLGPSAKLEIIFSGILNDQMAGFYRAKYTDKVTGETKYMATTQMEATDARRAFPCFDEPNLKATFAVTLVSESFLTHLSNMDVRNETIKEGKKYTTFNTTPKMSTYLVAFIVADLRYVESNNFRIPVRVYSTPGDEKFGQFAANLAARTLRFFEDTFNIEYPLPKMDMVAVHEFSAGAMENWGLVTYRVIDLLLDIENSSLDRIQRVAEVIQHELAHQWFGNLVTMDWWEGLWLNEGFATWMSWYSCNKFQPEWKVWEQYVTDNLQRALNLDSLRSSHPIEVPVNNADEINQIFDAISYSKGSSLLRMISKWLGEETFIKGVSQYLNKFKYGNAKTGDLWDALADASGKDVCSVMNIWTKRVGFPVLSVKEHKNKITLTQHRYLSTGDVKEEEDTTIYPILLALKDSTGIDNTLVLNEKSATFELKNEEFFKINGDQSGIFITSYSDERWAKLSKQANLLSVEDRVGLVADAKALSASGYTSTTNFLNLISNWKNEDSFVVWEQIINSLSALKSTWVFEPEDILNALDKFTLDLVLNKLSELGWNIGEDDSFAIQRLKVTLFSAACTSGNEKMQSIAVEMFEEYANGNKQAIPALFKAVVFNTVARLGGENNYEKIFNIYQNPVSSEEKIIALRALGRFEDKELLERTLSYLLDGTVLNQDFYIPMQGIRVHKKGIERLWAWMQEHWDEIAKRLQPGSPVLGGVLTLGLTNFTSFEALEKISAFYSRKVTKGFDQTLAQALDTIRSKAQWVSRDREIVATYLREHEYDQ

SEQ ID NO: 820 - DNA, 2637 bp, Oryza sativa (japonica cultivar-group)
  CDS (1)..(2637)
atggcggcggcggagcagagcgcggagcagttcaggggccaggcgaggctcccggggttcgcggcgccccggcggtacgacctgcggctcgtccccgacctcgacgggtgcgccttcacgggatctgtggacgtctccgtcgacgtcacggcgcccaccaggttcctcgtgctcaacgccgccgagctcgaggtctcccccgggggcgtccagttcaagccccatggcgccgagcaggagctgcacccagcggaggttaccaatgtgccagaggatgagatcctgattatccgcttcaatgaggttcttcctgtaggggagggaactttagtaattgcattcaagggaactctgaacgacaagatgcatggcttctacagaagtgtgtatgaactcaatggggagaagaagaacatggcggtaacccagtttgaacctgctgacgcaaggcgttgttttccttgttgggatgagccctcttttaaggctatattcaaaattactctagaagttccgtctgagaccgttgcattgtcaaacatgccagtggttgaagagaaggtcaatggccttatcaaagctgtctattttcaagaaacaccaataatgtcaacatacctagtggctgttattgttggcatgttcgactatgtggaagctttcaccactgatggcactagggttcgtgtttacactcaagttggcaagagtgcccagggaaagtttgcactagaggttgctgtgaagacactggtcctcttcaaggagtattttgctgtgccatacccactcccaaaaatggacatgattgccattcctgattttgcctctggagcaatggagaactatggcttggttacatatcgtgaaacagctttgttatttgatgagaaacactctgcagctgcgaataagcaaagggttgcagttgtggtagcccatgaattagctcaccagtggtttggaaatcttgtgacgatggagtggtggacacacctatggcttaacgagggttttgcgacatgggtctcctacttagctgcagacaatttctttcctgaatggaatgtttggacccaatttcttgaggaatctacaacaggtttcaagttagatgcccttgcagggtcacatccaattgaggtcgacgtaaatcacgttgatgaaatagatgaaatatttgatgctataagctacaggaaaggagctgctgttattcggatgctgcaaagctatcttggggctgaaacttttcagaaatctctggccgcatacatcgaaaagttcgcatattcaaatgccaagactgaggacttgtgggctgcccttgaagaggggtctggtgaaccagtgaaaacattaatgcattcatggacaaagcagcaagggtaccctgttgttaatgtgaagctcaaggatggaaagctagagatggagcagacacagttcctatcaagcggggctgaaggagttgggcaatgggtggttcccatcacactgtgttgctgttcgtactcacgtcaagagaagttcctttttaatggaaagcaagaggattttaatttgtcagggcttgtagaatgtcaaaagaaagaagacttctggattaaacttaatgtcaatcagactggcttctatagagtgagctatgatgaggaacttgcatctcgacttagatatgcaattgaagccaacaaactgagtgcagcagacagatatggtgtacttgatgacacatatgccctctgtatggctggcaaacagaagctagtctccttattgcatttgattgctgcgtacaaggatgaaaccgagtatactgtgctcgcccgtgtcatagatacaagtctgagcattgtcgagatggtggctgttgctgctcctgaggggttgggcaagctgaaaaagttcctgattgactttcttgagccatttgcacagagaattggttgggatgctaaaagcggtgagggtcacttggatgcattattgagaggtacacttttaactgctctggcagaacttggccatgaagctacaataaatgaagctgtacgccgatttaacatctttgtggaagatagagaaacaccactactccctccagatgttcgaaaggcggcatatgttgctttgatgcagacagtgaacaaatcaaacagagccggctatgaatcactattgaagatctataaagaaactgatctgagccaggaaaaagtcagaattttaggttctctagcatcttgccctgatcctgatgttgttcgtgatacactggacttcatgctgtcacctgaggtgaggaatcaggactctatatttttgcttagaggagtcggtgcagcgggacatgaggtggcatggacatggttgaaggaaaagtgggactacatttcagacaccttctctggaactcttctcacctatttcgtttccaccaccgtctcaccgctgcgcaccgatgaaatgggcgacgacgcggaggagttcttcaagagcaggacgaaggccaacatcgcgaggacggtgaagcagagcatcgagagagtgaggatcaatgccaaatgggtggagagcaccagggccgaggctaacctgggcaatgtcctcaaggaaatttctcacgaccactga

SEQ ID NO: 821 - protein, 878 aa, Oryza sativa (japonica cultivar-group)
MAAAEQSAEQFRGQARLPGFAAPRRYDLRLVPDLDGCAFTGSVDVSVDVTAPTRFLVLNAAELEVSPGGVQFKPHGAEQELHPAEVTNVPEDEILIIRFNEVLPVGEGTLVIAFKGTLNDKMHGFYRSVYELNGEKKNMAVTQFEPADARRCFPCWDEPSFKAIFKITLEVPSETVALSNMPVVEEKVNGLIKAVYFQETPIMSTYLVAVIVGMFDYVEAFTTDGTRVRVYTQVGKSAQGKFALEVAVKTLVLFKEYFAVPYPLPKMDMIAIPDFASGAMENYGLVTYRETALLFDEKHSAAANKQRVAVVVAHELAHQWFGNLVTMEWWTHLWLNEGFATWVSYLAADNFFPEWNVWTQFLEESTTGFKLDALAGSHPIEVDVNHVDEIDEIFDAISYRKGAAVIRMLQSYLGAETFQKSLAAYIEKFAYSNAKTEDLWAALEEGSGEPVKTLMHSWTKQQGYPVVNVKLKDGKLEMEQTQFLSSGAEGVGQWVVPITLCCCSYSRQEKFLFNGKQEDFNLSGLVECQKKEDFWIKLNVNQTGFYRVSYDEELASRLRYAIEANKLSAADRYGVLDDTYALCMAGKQKLVSLLHLIAAYKDETEYTVLARVIDTSLSIVEMVAVAAPEGLGKLKKFLIDFLEPFAQRIGWDAKSGEGHLDALLRGTLLTALAELGHEATINEAVRRFNIFVEDRETPLLPPDVRKAAYVALMQTVNKSNRAGYESLLKIYKETDLSQEKVRILGSLASCPDPDVVRDTLDFMLSPEVRNQDSIFLLRGVGAAGHEVAWTWLKEKWDYISDTFSGTLLTYFVSTTVSPLRTDEMGDDAEEFFKSRTKANIARTVKQSIERVRINAKWVESTRAEANLGNVLKEISHDH

SEQ ID NO: 822 - DNA, 2628 bp, Oryza sativa (japonica cultivar-group)
  CDS (1)..(2628)
atggcggcctcgccggagcagttccggggccaggcgcggctcccgcggtgcgcctccccgctcagctacgacctccgcctccgccccgacctcgccgcctgcgccttctccggctccgccgccgtcgccgtcgccgtctccgccccgacccgattcctcgtcctcaacgccgccgagctcgccgtcgacggatcctccgtccgcttccaggatttggtgccttccgaggtggtgcagttcgaggaggacgagatcgtggtcatcgggttcggccaggatctgccgatcggcgagggcgtgctcaagatggacttcaccgggacgctcaacgatcagatgagaggcttctacaggagcaagtatgagtacaagggggagtcaagaaatatggcagttacacagttcgaagctgctgatgcaagacgatgttttccatgctgggatgaacctgcatttaaggctaagttcaagctaacactggaagttccatcagagttggtagcactgtccaacatgccagtaattaaggagacagttcatggacctctcaagaccgtctattatgaggaatcgccacttatgtcaacttatctagtggctatagttgttggtttatttgattacatagagggctcaacattagaaggcaccaaagttcgtgtgtatactcaagttggcaagagtaaccaaggaaagtttgcactagatgttgcagtgaagtcactggatttattcaaagattattttgccactccttacccgctaccgaagttggatatggttgctattcctgattttgctgctggagctatggagaactatgggttggtcacttaccgagaaacagctttactttatgatgagctgttatcctcagcatccaataaacaacaggttgcaatcactgttgcacatgaattggctcatcaatggtttggcaatcttgtaaccatggagtggtggactcacttgtggctaaatgagggttttgcttcctgggtgagttatttggctgtggaagcattatttccagaatggaataactggacacaatttcttgatgagacgacctctggtctcagactggatgcacttgcagagtctcatcctattgaggttgacataaaccatgcctctgaaattgatgcaatttttgattccataagctatgataagggcgcttccgtcattcgcatgctgcaaagttaccttggtgcagagcgttttcagaaagctttggcatcatatataaagaagtatgcttactcgaatgccaaaacagaagatctatgggctgttcttgaggaggaatctggggaacctgttaaggatttgatgactacatggactaagcaacaaggataccctgttatttatgcaaaactagatggacatgatttgcaccttgaacaggcacagtttctatcggacggatcctctggtccaggcttgtggattgttcctataacatcatgttgtggctcatatgatgcacagaaaaagtttctcttgaagggcaagactgataaggtccatatagacctcactgcctcccaaaatgccggaggagagaagggtgaaaactgttggatcaaattgaacgttgaccaaactggattttatagagtgaagtatgatgatgaacttgcagctggacttgaaaaggcaatcaaagccaataagctctctttaatggataagattggtattgtggaagattcatactccctttctgtggctcgcaagcaaacactgacatccttgcttcgcctgctgaatgcttatcgcaatgagtctgattacactgtgctttcacatgtaacctctgtatgcttaggcattgataaaatatcagttgatgctactcctgaattgtccagagatatcaaacagcttttgatcaatcttcttctatcagctgccaaaacactaggctgggatcccaaggagggcgagagccatcttgatgtaatgcttagatcattgctcttgattgcccttgtcaaacttggacatgatgagactataaatgagggagttaggcggttccatatcttcataaaagaccgcaaaactaacattcttcccccagacactagaaaggcttcatatcttgctgtgatgcggactgttactacctccagcagagctggttatgatgccctcctgaaaatctacagagaaacagctgaagctcaggagaagtcacgcatcttaggttcattgtcttcatgcctggataaggatattgttcttgaggcactaaacttcatgcttaccgatgaggtacggaatcaagatgcattttatgtccttggtggtatcagcttagaaggacgagaagttgcatgggcctggttgaaggaaaactgggatcatgtcttgaagacctggccatcaagttcactcatatcggacttcgtcaaatctactgtttcacggttcaccacagaggagaaggctgctgaagtttccgagttcttcgccggtaaaaccaaaccatcgttcgagcgtgcactgaagcagagcctcgagagggtccgtatcagcgcgagatggatcgagagcatcaggagcgagcctaaccttgctcagacagtgaacgagctgctgcagcacgacatgtag

SEQ ID NO: 823 - protein, 875 aa, Oryza sativa (japonica cultivar-group)
MAASPEQFRGQARLPRCASPLSYDLRLRPDLAACAFSGSAAVAVAVSAPTRFLVLNAAELAVDGSSVRFQDLVPSEVVQFEEDEIVVIGFGQDLPIGEGVLKMDFTGTLNDQMRGFYRSKYEYKGESRNMAVTQFEAADARRCFPCWDEPAFKAKFKLTLEVPSELVALSNMPVIKETVHGPLKTVYYEESPLMSTYLVAIVVGLFDYIEGSTLEGTKVRVYTQVGKSNQGKFALDVAVKSLDLFKDYFATPYPLPKLDMVAIPDFAAGAMENYGLVTYRETALLYDELLSSASNKQQVAITVAHELAHQWFGNLVTMEWWTHLWLNEGFASWVSYLAVEALFPEWNNWTQFLDETTSGLRLDALAESHPIEVDINHASEIDAIFDSISYDKGASVIRMLQSYLGAERFQKALASYIKKYAYSNAKTEDLWAVLEEESGEPVKDLMTTWTKQQGYPVIYAKLDGHDLHLEQAQFLSDGSSGPGLWIVPITSCCGSYDAQKKFLLKGKTDKVHIDLTASQNAGGEKGENCWIKLNVDQTGFYRVKYDDELAAGLEKAIKANKLSLMDKIGIVEDSYSLSVARKQTLTSLLRLLNAYRNESDYTVLSHVTSVCLGIDKISVDATPELSRDIKQLLINLLLSAAKTLGWDPKEGESHLDVMLRSLLLIALVKLGHDETINEGVRRFHIFIKDRKTNILPPDTRKASYLAVMRTVTTSSRAGYDALLKIYRETAEAQEKSRILGSLSSCLDKDIVLEALNFMLTDEVRNQDAFYVLGGISLEGREVAWAWLKENWDHVLKTWPSSSLISDFVKSTVSRFTTEEKAAEVSEFFAGKTKPSFERALKQSLERVRISARWIESIRSEPNLAQTVNELLQHDM

SEQ ID NO: 824 - DNA, 2640 bp, Arabidopsis thaliana
  CDS (1)..(2640)
atggatcagttcaaaggtgagcctcgtctacccaagttcgccgtccccaagcgctacgatctccgcctcaatcccgatctcatcgcctgcaccttcactggaactgtagccatcgatctcgacatagtcgccgatactcgtttcatcgttctcaacgcagctgatctctccgtcaacgatgcctccgtttccttcactcctccttcctcctctaaggcgcttgcagctccaaaagttgtcttgtttgaggaggatgagattctcgtgcttgagtttggtgagattcttccccatggagtgggagttctgaaacttggtttcaatggagtactaaatgacaaaatgaagggattctacagaagtacttatgaacataacggtgagaagaagaatatggcagttacccagtttgaaccagctgatgctaggagatgctttccatgttgggatgaacctgcttgcaaggctaccttcaagattacattagaggtgccaactgatttggtggctctctccaatatgccaataatggaggagaaagtcaatgggaatctgaagattgtctcctatcaagagtcaccaatcatgtctacatatttggtagcaattgttgttggtttgtttgactacgtggaagatcatacatccgatgggattaaagtcagagtatactgtcaagtgggcaaagccgaccaagggaaatttgcattgcatgttggtgccaagacattggatctgttcaaagagtactttgctgtgccatatccccttcccaaaatggatatgattgcaataccagattttgctgccggagctatggagaattatggtttagttacataccgtgaaacagctcttctctatgatgaacaacattcagctgcttctaacaaacagagggttgccactgtagttgctcatgaactggcccaccagtggtttggcaatcttgttactatggagtggtggactcatctatggctgaatgagggttttgctacttgggtcagctacttggctactgatagtttgttccctgaatggaaaatctggacccagtttttagatgaatctactgagggtctaaggctagatgggcttgaggagtctcacccgatagaggtggaggttaatcatgctgctgaaattgatgaaatatttgatgcaataagctacagaaagggtgcatctgtcatccgcatgctacaaagctatcttggtgctgaggtttttcagaagtctcttgctgcatacattaaaaatcacgcttattcaaacgcgaagacagaagatttatgggctgctttggaagcgggatccggagaacctgtgaacaagcttatgagttcttggacaaagcaaaaaggatatcctgtcgtctcagccaaaataaaagatggaaaattggaactcgagcagtctcgattcttgtcaagtggttctcctggggaaggacaatggattgtaccagtgaccttgtgttgtggttcatatgaaaagcgcaaaaacttcttattagaatccaaatctggagcgtatgatttaaaggaattattgggctgctccattgccgatggtagcgacaaaattaatgggacatgttcttggataaaaatcaatgttgatcaggctggattctatagggtgaaatatgatgacagccttgcggctggactcagaaatgcaacagagagccaaagcttgacttctatcgatagatatggtattttggatgattcgtttgcacttactatggctcgtcagcaatcactggcctcattgctcactttgtgtagtgcttacaagaaggaacttgactatactgtgctgtcaaatcttattgctataagctacaaagttgtgaagattggagcagatgcaaatcaagaactgatgtctgggattaaacatttcttcattggcgttttccagtttgctgctgggaaacttggttgggatcctaagcaaggcgagagccatctagatgctatgctgagaggggaagtcttaactgcacttgctgtgtttgggcatgatgagacactaaaggaagcagttcgaagatttgatgcatttttggctgataggaacactccgcttctgcctcctgacattagaagggctgcttatgttgctgtaatgcagagagctaacaaatcagacaaatctggttatgagtctcttctgagagtttatagggaaaccgacctgagccaagagaaaacacgaatcttaggttctttagcatcttgcccagaccccactatagttcaagatgttcttaacttcgtattgtctgatgaggtccgtaatcaagatgcactttatggactttccggtgtaagttgggaaggacgtgaagtagcttggaaatggctacaggaaaagtgggagtatataggaaacacatggggctccggatttctcataacacgcttcataagtgcagttgtatcgccgtttgcgtcgtttgagaaagccaaagaagtggaggagttttttgcaacaagatcaaagccttcgatggcaagaaccttgaagcagagcattgaaagggtacatatcaatgccaattgggtggagagtatcaagaaggaagataatctcacgcagctcgttgctcagctctcttcaaactaa

SEQ ID NO: 825 - protein, 879 aa, Arabidopsis thaliana
MDQFKGEPRLPKFAVPKRYDLRLNPDLIACTFTGTVAIDLDIVADTRFIVLNAADLSVNDASVSFTPPSSSKALAAPKVVLFEEDEILVLEFGEILPHGVGVLKLGFNGVLNDKMKGFYRSTYEHNGEKKNMAVTQFEPADARRCFPCWDEPACKATFKITLEVPTDLVALSNMPIMEEKVNGNLKIVSYQESPIMSTYLVAIVVGLFDYVEDHTSDGIKVRVYCQVGKADQGKFALHVGAKTLDLFKEYFAVPYPLPKMDMIAIPDFAAGAMENYGLVTYRETALLYDEQHSAASNKQRVATVVAHELAHQWFGNLVTMEWWTHLWLNEGFATWVSYLATDSLFPEWKIWTQFLDESTEGLRLDGLEESHPIEVEVNHAAEIDEIFDAISYRKGASVIRMLQSYLGAEVFQKSLAAYIKNHAYSNAKTEDLWAALEAGSGEPVNKLMSSWTKQKGYPVVSAKIKDGKLELEQSRFLSSGSPGEGQWIVPVTLCCGSYEKRKNFLLESKSGAYDLKELLGCSIADGSDKINGTCSWIKINVDQAGFYRVKYDDSLAAGLRNATESQSLTSIDRYGILDDSFALTMARQQSLASLLTLCSAYKKELDYTVLSNLIAISYKVVKIGADANQELMSGIKHFFIGVFQFAAGKLGWDPKQGESHLDAMLRGEVLTALAVFGHDETLKEAVRRFDAFLADRNTPLLPPDIRRAAYVAVMQRANKSDKSGYESLLRVYRETDLSQEKTRILGSLASCPDPTIVQDVLNFVLSDEVRNQDALYGLSGVSWEGREVAWKWLQEKWEYIGNTWGSGFLITRFISAVVSPFASFEKAKEVEEFFATRSKPSMARTLKQSIERVHINANWVESIKKEDNLTQLVAQLSSN

SEQ ID NO: 826 - DNA, 2538 bp, Streptococcus pyogenes M1 GAS
  CDS (1)..(2538): transl_table=11
atgaagacagtagaacatctcatcgaaacatttgtgcctgaaaattataacatctttttagatattaatcgtcagactaaaacatttacggggaatgttgcgattaatggtgaagctttagataatcatgtggctttccaccaaaaagatttggacattaagtctattttgctcgataatgaagctgttatttatcaagtggataacgacaatgaagttgtgcgtgttgaattacctgaaacaggaatgatgacgcttgtcattgaattttcaggtagcattacagataatatgacaggtatttacccttcatattacactaaaaatggtgagaaaaaagaagtcatttcaactcagtttgaaagccattttgcacgtgaagctttcccatgtatcgatgaaccacaagcaaaagctacttttgatttaagcttgacctttgatcaagaaattggtgagatagcgttatcgaatatgccagaagtcaatattgaccgtcgcgaggagactggtctttggacatttgatacgacactaagaatgtcatcttacttgctagcgtttgcgctaggagaacttcatggaaagactgtagaaagcaaaaaaggaacaactgttggtgtgtatgcgacaacagcgcatcctcttagctcgcttgatttttcattggatattgcagttcgtgttatcaacttttatgaagactattttggagtacattacccaatcccgcaatctcttaatattgcgcttccagatttttcatctggtgctatggaaaattggggtttaatcacttatcgtgaaatttatttattagtagatgaaaattcgactgttcaaagccgacaacaagttgcacttgtaatcgcccacgagatagcacaccaatggtttggaaacttggttacaatgaaatggtgggacgatctgtggttaaatgagagttttgccaacatgatggaatatgtctctatcgaggctattgagccgtcttggaaaataatagaagatttccaaacaggcggtattcctcttgctttaaaacgtgatgctactgatggtgttcaatcagtgcatgttgaagtcaatcatccagatgagataaatacattgtttgatcctgctattgtctatgcaaaaggtagtcgtttgatgcatatgttacgccgttttattggtgatcgtgattttgccattggcttacatcactactttgaaaaatatcaatatcgaaatactgtcgggcgtgatttatggaatattttatcagatacttcaggcaaagacgtagctgcttttatggatgcttggcttgaacaaccaggttatccagttttaacagctcgccttgaaaacgatcaattgattttgagtcaaaaacaattttttattggaaaaggtgaagaaaaaggtcgcctttggccgattcctttaaacactaattggcatggccttcctgaaactttgacagaggcagaaatggtcattccaaactttagtcaattggcagcagaaaatgaaggagctctacgtttcaatattgataatacagctcattacattacagactaccaaggatcattattagatgccttagtcactgaacttgcccaacttgataatacttctgctttacaagttattcaagaacgtcgtttattggcagatagtggcttgatttcctatgctgaattggttgacttaattgctcaattggacgattctaagtcttatatggtagcagaagcggttcaacaagtggtctctggtttgaaacgcttcattgatgaaggaagcttagcagaaaaatcctttaatcgcttggtaaccaccatctatcaagaagactttaatcagcatggttttgagaaaaaagctgacgaatcagatgaagatgagatggtacgtcaggttgccttgggccgcttgtggctagcagaaaatcagacgattattgacggattgagaactatttttgaagcatatcaaaacaatattgcaagtattccagcagctgttcgtcgcttggttttagccaaccaaatgaaatattttgaaacagatagcttggttgatatttattttgagacttatgtagcaactactgataataatttacgcagtgatttaacggttgcttttagtcaaacaaaacaaccaactactattagacgtattcttgttagtttaaaagataaagatattattaaacctcaggatttatcttattggtacaatgctttgcttggacaaagctttactcaagatatcatttgggaatgggctagagaaaattgggattggattaaatctgcacttggtggagatatgagctttgataaatttgttatttatccagcaagtaactttaaaacaccaaaacatctagcagaatataaatctttctttgaacctaagctagatgatatggctattagccgtaatattaccatgggaattaatgaaattgaagcacgtgttgctttgattactaaagaaaaagaagcagttattgcagctctcagtcattactag

SEQ ID NO: 827 - protein, 845 aa, Streptococcus pyogenes M1 GAS
MKTVEHLIETFVPENYNIFLDINRQTKTFTGNVAINGEALDNHVAFHQKDLDIKSILLDNEAVIYQVDNDNEVVRVELPETGMMTLVIEFSGSITDNMTGIYPSYYTKNGEKKEVISTQFESHFAREAFPCIDEPQAKATFDLSLTFDQEIGEIALSNMPEVNIDRREETGLWTFDTTLRMSSYLLAFALGELHGKTVESKKGTTVGVYATTAHPLSSLDFSLDIAVRVINFYEDYFGVHYPIPQSLNIALPDFSSGAMENWGLITYREIYLLVDENSTVQSRQQVALVIAHEIAHQWFGNLVTMKWWDDLWLNESFANMMEYVSIEAIEPSWKIIEDFQTGGIPLALKRDATDGVQSVHVEVNHPDEINTLFDPAIVYAKGSRLMHMLRRFIGDRDFAIGLHHYFEKYQYRNTVGRDLWNILSDTSGKDVAAFMDAWLEQPGYPVLTARLENDQLILSQKQFFIGKGEEKGRLWPIPLNTNWHGLPETLTEAEMVIPNFSQLAAENEGALRFNIDNTAHYITDYQGSLLDALVTELAQLDNTSALQVIQERRLLADSGLISYAELVDLIAQLDDSKSYMVAEAVQQVVSGLKRFIDEGSLAEKSFNRLVTTIYQEDFNQHGFEKKADESDEDEMVRQVALGRLWLAENQTIIDGLRTIFEAYQNNIASIPAAVRRLVLANQMKYFETDSLVDIYFETYVATTDNNLRSDLTVAFSQTKQPTTIRRILVSLKDKDIIKPQDLSYWYNALLGQSFTQDIIWEWARENWDWIKSALGGDMSFDKFVIYPASNFKTPKHLAEYKSFFEPKLDDMAISRNITMGINEIEARVALITKEKEAVIAALSHY

SEQ ID NO: 828 - DNA, 2547 bp, Streptococcus pneumoniae TIGR4
  CDS (1)..(2547): transl_table=11
atgcaagcagttgaacattttattaagcaatttgttcctgaacattatgatttatttttagatttgagtcgtgagaccaagactttttctgggaaagtgaccatcactggtcaagcacagagtgaccgcatctccctccaccaaaaagatttggaaatcacctctgtagaagttgcaggtcaagctcgtccatttacagttgaccatgacaatgaagcccttcatatcgaattggctgaggctggtcaagttgaattggttcttgccttttctggtaaaattacagacaacatgacagggatttacccttcttattatacagttgatggagtcaagaaggaggtcttgtctactcagttcgagagccattttgcgcgcgaagctttcccatgtgtggatgagcctgaagccaaagcaacttttgacctctctcttcgctttgaccaagcagaaggtgaattggccttgtcaaacatgccagaaatcgatgttgaaaaccgtaaggaaacaggtatctggaagtttgagacaacacctcgcatgtcttcttacttgttggcctttgttgctggtgatttgcaaggggtgaccgctaaaactaaaaatggtaccctggtaggtgtctactcaaccaaagcacatccactttcaaatcttgatttctcactggatatcgctgttcgctctatcgagttttacgaagattactatggagttaagtacccaattcctcaatctctccacatcgcccttcctgacttctcagctggtgctatggaaaactggggtcttgtgacctaccgtgaagtttacttggttgtcgatgagaactctacatttgctagccgtcaacaagttgcccttgttgtggcccatgaattggctcaccaatggtttgggaacctcgtgactatgaaatggtgggatgacctttggctcaatgaaagtttcgctaatatgatggaatacgtctgtgtggataccatcgaaccaagctggaatatctttgaagatttccaaacaggtggagtacctcttgctcttgaacgtgacgctactgatggcgttcagtctgtccacgtcgaagttaaacatccagatgaaatcaatacactctttgacggcgctatcgtctatgccaaaggaagccgtctcatgcacatgcttcgccgttggctaggagatgctgattttgctaaaggtttgcacgcctactttgaaaaacaccaatacagcaacaccattggtagtgacctttgggatgcccttggtcaagcgtcaggacgtgatgtcgcagccttcatggattcttggttggaacagcctggttacccagttcttactgttaaagttgaaaatgatgtcttgaagatttcacaaaaacaattcttcatcggtgagaacgaagacaagaaccgtctctgggtggtgcccctcaatagcaactggaaaggcttgcctgatacactcgaaactgaaagtatcgaaatccctggctacgcagctcttcttgctgaaaatgaaggagctcttcgtctcaacactgaaaatactgcccactatattaccgactatcaaggagacttgttagcagctgttcttgctgagctagagacacttgataacacaagcaaactgcaaattgttcaagaacgtcgtttgttggctgaggcagggcacatttcttatgcagacttgcttccagttcttgataaacttgctaaggaagagtcttatctggtggtttcagctgtttctcaagtgatttcagcccttgagcgctttattgatgaaggaacggatgctgaaacagccttcaaaggactggttgctaaattggctcgtcataactatgaccgtcttggttttgaagctaaagacggagaatcagatgaggatgaattggttcgtcagctggctgtttcgatgatgattcgctcaaatgatgcagaagctagtcaagtcgctagccaaatcttcgcaacacacaaggagaatcttgcaggactcccagcagctattcgctcacaagttctgattaatgagatgaaacatcatgagactaaagacttgttagcactttatcttgatacttatactcacgcaacagatgctgtctttaaacgccagttggcagcagctcttgcatacagtacagatgcggataatatccaaaacctgattacttcttggaaggacaaatttgtggtcaaaccacaggacttgtctgcttggtattaccaattcctagctcatcaagcaactcagaaaacagcttggtcttgggcgcgtgaaaactgggcttggattaaggcagcccttggaggagatatgagctttgatagctttgttatccttcctgctcatgtatttaagactcagcaacgcttggcggaatacaaggagttctttgaaccgcaactttctgaccttgctcttagccgtaacatcggtatgggaatcaaggaaattgcagcgcgtgttgacttgattagccgtgaaaaagctgcagtcgaagcagttgttcttcaatacggaaatgcataa

SEQ ID NO: 829 - protein, 848 aa, Streptococcus pneumoniae TIGR4
MQAVEHFIKQFVPEHYDLFLDLSRETKTFSGKVTITGQAQSDRISLHQKDLEITSVEVAGQARPFTVDHDNEALHIELAEAGQVELVLAFSGKITDNMTGIYPSYYTVDGVKKEVLSTQFESHFAREAFPCVDEPEAKATFDLSLRFDQAEGELALSNMPEIDVENRKETGIWKFETTPRMSSYLLAFVAGDLQGVTAKTKNGTLVGVYSTKAHPLSNLDFSLDIAVRSIEFYEDYYGVKYPIPQSLHIALPDFSAGAMENWGLVTYREVYLVVDENSTFASRQQVALVVAHELAHQWFGNLVTMKWWDDLWLNESFANMMEYVCVDTIEPSWNIFEDFQTGGVPLALERDATDGVQSVHVEVKHPDEINTLFDGAIVYAKGSRLMHMLRRWLGDADFAKGLHAYFEKHQYSNTIGSDLWDALGQASGRDVAAFMDSWLEQPGYPVLTVKVENDVLKISQKQFFIGENEDKNRLWVVPLNSNWKGLPDTLETESIEIPGYAALLAENEGALRLNTENTAHYITDYQGDLLAAVLAELETLDNTSKLQIVQERRLLAEAGHISYADLLPVLDKLAKEESYLVVSAVSQVISALERFIDEGTDAETAFKGLVAKLARHNYDRLGFEAKDGESDEDELVRQLAVSMMIRSNDAEASQVASQIFATHKENLAGLPAAIRSQVLINEMKHHETKDLLALYLDTYTHATDAVFKRQLAAALAYSTDADNIQNLITSWKDKFVVKPQDLSAWYYQFLAHQATQKTAWSWARENWAWIKAALGGDMSFDSFVILPAHVFKTQQRLAEYKEFFEPQLSDLALSRNIGMGIKEIAARVDLISREKAAVEAVVLQYGNA

SEQ ID NO: 830 - DNA, 2547 bp, Streptococcus pneumoniae R6
  CDS (1)..(2547): transl_table=11
atgcaagcagttgaacattttattaagcaatttgttcctgaacattatgatttatttttagatttgagtcgtgagaccaagactttttctgggaaagtgaccatcactggtcaagcacagagtgaccgcatctccctccaccaaaaagacttggaaatcacctctgtagaagttgcaggtcaagctcgtccatttacagttgaccatgacaatgaagcccttcatatcgaattggctgaggctggtcaagttgaattggttcttgccttttctggtaaaattacagacaacatgacagggatttacccttcttattatacagttgatggagtcaagaaggaggtcttgtctactcagttcgagagccattttgcgcgcgaagctttcccatgtgtggatgagcctgaagccaaagcaacttttgacctctctcttcgctttgaccaagcagaaggtgaattggccttgtcaaacatgccagaaatcgatgttgaaaaccgtaaggaaacaggtatctggaagtttgagacaacacctcgcatgtcttcttacttgttggcctttgttgctggtgatttgcaaggggtgaccgctaaaactaaaaatggtaccctggtaggtgtctactcaaccaaagcacatccactttcaaatcttgatttctcactggatatcgctgttcgctctatcgagttttacgaagattactatggagttaagtacccaattcctcaatctctccacatcgcccttcctgacttctcagctggtgctatggaaaactggggtcttgtgacctaccgtgaagtttacttggttgtcgatgagaactctacatttgctagccgtcaacaagttgcccttgttgtggcccatgaattggctcaccaatggtttgggaacctcgtgactatgaaatggtgggatgacctttggctcaatgaaagtttcgctaatatgatggaatacgtctgtgtggataccatcgaaccaagctggaatatctttgaagatttccaaacaggtggagtacctcttgctcttgaacgtgacgctactgatggcgttcagtctgtccacgtcgaagttaaacatccagatgaaatcaatacactctttgacggcgctatcgtctatgccaaaggaagccgtctcatgcacatgcttcgccgttggctaggagatgctgattttgctaaaggtttgcacgcctactttgaaaaacaccaatacagcaacaccattggtagtgacctttgggatgcccttggtcaagcgtcaggacgtgatgtcgcagccttcatggattcttggttggaacagcctggttacccagttcttactgtcaaagttgaaaatgatgtcttgaagatttcacaaaaacaattcttcatcggtgagaacgaagacaagaaccgtctctgggtggtgcccctcaatagcaactggaaaggcttgcctgatacactcgaaactgaaagtatcgaaatccctggctacgcagctcttcttgctgaaaatgaaggagctcttcgtctcaacactgaaaatactgcccactatattaccgactatcaaggagacttgttagaagctgttcttgctgagctagagacacttgataacacaagcaaactgcaaattgttcaagaacgtcgtttgttggctgaggcagggcacatttcttatgcagacttgcttccagttcttgataaacttgctaaggaagagtcttatctggtggtttcagctgtttctcaagtgatttcagcccttgagcgctttattgatgaaggaacggatgctgaaacagccttcaaaggactggttgctaaattggctcgtcataactatgaccgtcttggttttgaagctaaagacggagaatcagatgaggatgaattggttcgtcagctggctgtttcgatgatgattcgctcaaatgatgcagaagctagtcaagtcgctagccaaatcttcgcaacacacaaggagaatcttgcaggactcccagcagctattcgctcacaagttctgattaatgagatgaaacatcatgagactaaagacttgttagcactttatcttgatacttatactcacgcaacagatgctgtctttaaacgccagttggcagcagctcttgcatacagtacagatgcggataatatccaaaacctgattacttcttggaaggacaaatttgtggtcaaaccacaggacttgtctgcttggtattaccaattcctagctcatcaagcaactcagaaaacagcttggtcttgggcgcgtgaaaactgggcttggattaaggcagcccttggaggagatatgagctttgatagctttgttatccttcctgctcatgtatttaagactcagcaacgcttggcggaatacaaggagttctttgagccgcaactttctgaccttgctcttagccgtaacatcggtatgggaatcaaggaaattgcagcacgtgttgacttgattagccgtgaaaaagctgcagtcgaagcagttgttcttcaatacggaaatgcataa

SEQ ID NO: 831 - protein, 848 aa, Streptococcus pneumoniae R6
MQAVEHFIKQFVPEHYDLFLDLSRETKTFSGKVTITGQAQSDRISLHQKDLEITSVEVAGQARPFTVDHDNEALHIELAEAGQVELVLAFSGKITDNMTGIYPSYYTVDGVKKEVLSTQFESHFAREAFPCVDEPEAKATFDLSLRFDQAEGELALSNMPEIDVENRKETGIWKFETTPRMSSYLLAFVAGDLQGVTAKTKNGTLVGVYSTKAHPLSNLDFSLDIAVRSIEFYEDYYGVKYPIPQSLHIALPDFSAGAMENWGLVTYREVYLVVDENSTFASRQQVALVVAHELAHQWFGNLVTMKWWDDLWLNESFANMMEYVCVDTIEPSWNIFEDFQTGGVPLALERDATDGVQSVHVEVKHPDEINTLFDGAIVYAKGSRLMHMLRRWLGDADFAKGLHAYFEKHQYSNTIGSDLWDALGQASGRDVAAFMDSWLEQPGYPVLTVKVENDVLKISQKQFFIGENEDKNRLWVVPLNSNWKGLPDTLETESIEIPGYAALLAENEGALRLNTENTAHYITDYQGDLLEAVLAELETLDNTSKLQIVQERRLLAEAGHISYADLLPVLDKLAKEESYLVVSAVSQVISALERFIDEGTDAETAFKGLVAKLARHNYDRLGFEAKDGESDEDELVRQLAVSMMIRSNDAEASQVASQIFATHKENLAGLPAAIRSQVLINEMKHHETKDLLALYLDTYTHATDAVFKRQLAAALAYSTDADNIQNLITSWKDKFVVKPQDLSAWYYQFLAHQATQKTAWSWARENWAWIKAALGGDMSFDSFVILPAHVFKTQQRLAEYKEFFEPQLSDLALSRNIGMGIKEIAARVDLISREKAAVEAVVLQYGNA

SEQ ID NO: 832 - DNA, 2538 bp, Streptococcus pyogenes MGAS8232
  CDS (1)..(2538): transl_table=11
atgaagacagtagaacatctcatcgaaacatttgtgcctgaaaattataacatctttttagatattaatcgtcagactaaaacatttacggggaatgttgcgattaatggtgaagctttagataatcatgtggctttccaccaaaaagatttggacattaagtctattttgctcgataatgaagctgttatttatcaagtggataacgacaatgaagttgtgcgtgttgaattacctgaaacaggaatgatgacgcttgtcattgaattttcaggtagcattacagataatatgacaggtatttacccttcatattacactaaaaatggtgagaaaaaagaagtcatttcaactcagtttgaaagccattttgcacgtgaagctttcccatgtattgatgaaccacaagcaaaagctacttttgatttaagcttgacctttgatcaagaaattggtgagatagcgttatcgaatatgccagaagtcaatattgaccgtcgcgaggagactggtctttggacatttgatacgacaccaagaatgtcatcttacttgctagcgtttgcgctaggagaacttcatggaaagactgtagaaagcaaaaaaggaacaactgttggtgtgtatgcgacaacagcgcatcctcttagctcgcttgatttttcattggatattgcagttcgtgttatcaacttttatgaagactattttggagtacattacccaatcccgcaatctcttaatattgcgcttccagatttttcatctggtgctatggaaaattggggtttaatcacttatcgtgaaatttatttattagtagatgaaaattcgactgttcaaagccgacaacaagtggcacttgtaatcgcccacgagatagcacaccaatggtttggaaacttggttacaatgaaatggtgggacgatctgtggttaaatgagagttttgccaacatgatggaatatgtctctatcgaggctattgagccgtcttggaaaataatagaagatttccaaacaggcggtattcctcttgctttaaaacgtgatgctactgatggtgttcaatcagtgcatgttgaagtcaatcatccagatgaaataaatacattgtttgatcctgctattgtctatgcaaaaggtagtcgtttgatgcatatgttacgccgttttattggtgatcgtgattttgccattggcttacatcactactttgaaaaatatcaatatcgaaatactgtcgggcgtgatttatggaatattttatcagatacttcaggcaaagacgtagctgcttttatggatgcttggcttgaacaaccaggttatccagttttaacagctcgccttgaaaacgatcaattgattttgagtcaaaaacaattttttattggaaaaggtgaagaaaaaggtcgcctttggccgattcctttaaacactaattggcatggccttcctgaaactttgacagaggcagaaatggtcattccaaactttagtcaattggcagcagaaaatgaaagagctctacgtttcaatattgataatacagctcattacattacagattaccaaggatcattattagatgccttagtcactgaacttgcccaacttgataatacttctgctttacaagttattcaagaacgtcgtttattggcagatagtggcttgatttcctatgctgaattggttgacttaattgctcaattggacgattctaagtcttatatggtagcagaagcggttcagcaagtggtctctggtttgaaacgcttcattgatgaaggaagcttagcagaaaaatcctttaatcgcttggtaaccaccatctatcaagaagactttaatcagcatggttttgagaaaaaagctgacgaatcagatgaagatgagatggtacgtcaggttgccttgggacgcttgtggctagcagaaaatcagacgattattgacggattgagaactatttttgaagcatatcaaaacaatattgcaagtattccagcagctgttcgtcgcttggttttagccaaccaaatgaaatattttgaaatagatagcctggttgatatttattttgagacttatgtagcaactactgataataatttacgcagtgatttaacggttgcttttagtcaaacaaaacaactaactactattagacgtattcttgttagtttaaaagataaagatattattaaacctcaggatttatcttattggtacaatgctttacttggacaaagctttactcaagatatcatttgggaatgggctagagaaaattgggattggattaaatctgcacttggtggagatatgagctttgataaatttgttatttatccagcaagtaactttaaaacaccaaaacatctagcagaatataaatctttctttgaacctaagctagatgatatggctattagccgtaatattaccatgggaattaatgaaattgaagcacgtgttgctttgatcactaaagaaaaagaagcagttattgcagctctcagtcattactag

SEQ ID NO: 833 - protein, 845 aa, Streptococcus pyogenes MGAS8232
MKTVEHLIETFVPENYNIFLDINRQTKTFTGNVAINGEALDNHVAFHQKDLDIKSILLDNEAVIYQVDNDNEVVRVELPETGMMTLVIEFSGSITDNMTGIYPSYYTKNGEKKEVISTQFESHFAREAFPCIDEPQAKATFDLSLTFDQEIGEIALSNMPEVNIDRREETGLWTFDTTPRMSSYLLAFALGELHGKTVESKKGTTVGVYATTAHPLSSLDFSLDIAVRVINFYEDYFGVHYPIPQSLNIALPDFSSGAMENWGLITYREIYLLVDENSTVQSRQQVALVIAHEIAHQWFGNLVTMKWWDDLWLNESFANMMEYVSIEAIEPSWKIIEDFQTGGIPLALKRDATDGVQSVHVEVNHPDEINTLFDPAIVYAKGSRLMHMLRRFIGDRDFAIGLHHYFEKYQYRNTVGRDLWNILSDTSGKDVAAFMDAWLEQPGYPVLTARLENDQLILSQKQFFIGKGEEKGRLWPIPLNTNWHGLPETLTEAEMVIPNFSQLAAENERALRFNIDNTAHYITDYQGSLLDALVTELAQLDNTSALQVIQERRLLADSGLISYAELVDLIAQLDDSKSYMVAEAVQQVVSGLKRFIDEGSLAEKSFNRLVTTIYQEDFNQHGFEKKADESDEDEMVRQVALGRLWLAENQTIIDGLRTIFEAYQNNIASIPAAVRRLVLANQMKYFEIDSLVDIYFETYVATTDNNLRSDLTVAFSQTKQLTTIRRILVSLKDKDIIKPQDLSYWYNALLGQSFTQDIIWEWARENWDWIKSALGGDMSFDKFVIYPASNFKTPKHLAEYKSFFEPKLDDMAISRNITMGINEIEARVALITKEKEAVIAALSHY

SEQ ID NO: 834 - DNA, 2688 bp, Xanthomonas axonopodis pv. citri str. 306
  CDS (1)..(2688): transl_table=11
ttgccaatgcgtcgtctcacctgcctgattgctccctctcttcttgcgctgtgctgtggtactgccctggcacagtcgtccggcgagccggttcccaatggtcgtctgccgacctgggcagtaccggagcgctacagcctcgcgctcaagatcgacccggagcaaacgcaattcagcggccgcaccaccattcgcgtgcagctcaagcaggcgtccgaccatctctggctgcatggcaaggcattgaaggtcagcaaggtcaccgtcaagcccggtaagggcaagggcaaggcgctgactgcacgctacgtggaagccgatgcgcaaaccggcgtggcaaggctggatttcggccgcacgctctcgccgcagacgcttaccgtggagatcgcctacagcgcgccgctcaaccaacagctgcagggcctgtaccaggtgaaataccagggcaaggcgtatgcgatgacgcagatggagccgatcagtgcgcgctacgcgttcccgggcttcgacgagccggcgttcaagacgccgttcgacatcagcctgaccgtgcccagcaatgaccaggcgctggccaacaccatcgcgacctcgaccaagccggccggcaagggctggaagacggtgaccttcgccccgaccgtgccgctgccgacctacctggtcgcctacgccgccggcccatgggacgtggtggatgtggcaccgatgccggccaccccgcagcgtccgaacgccacgccattgcgcggcattgccgccaagggccagggcccgcgcatcacccctgcgctggaccagaccccggccatcatcgccgcgctggaggactactacgccttcggctacccgttcgacaagctcgatctggtcgctgcgccggacttcagcgccggcgcgatggaaaaccctgggtttgtgaccttccgcgattggctgctgttgctggacaaggattcgccggccgagaacgtgcagcgctccttcaacgtcaatgcgcacgaactggcgcatcagtggaccggcgacaccgtgaccatggcgtggtgggacgacctgtggctcaacgaagcgttcgccacctggatgcagcagaagatcaccatgcaactgcatccggaataccacgccaatctggaccgtatcggcggtgcacagcatgcgatggagaacgacagcctggtgagcgcacgcaagattcgccagccgatcaccggcaatggcgatatcgaaaccgccttcgatggcatcacctaccagaagggcgcggcggtgctggcgatgttcgaagccttcgtcggcgaagacgtgttccgcgagggcatgcgcgcctatatcgccaagcacaagttcgggaacgcgactgccgacgacctggtcgatgcggtcgcacaagcggccggcaagggcgatgatttcaaggccgcattccgcagcttcctcaaccagccgggcgtgccgtatctgcagacccaggtggcgcgcgaaggcggcaagaccgtggtcaaactgcagcagcagcgctacctgccgctggggtccaccgggtctgccgcgcagcaatggggcgtgccggtgtgcgtgaagtacggcaagggcaagaaccaggtcggtaccgcctgccagttgcttgaagacggcagcggcagcatcgtgctggaaggcgccggcaagaacacctgggtgttcccgaatgcgcgtggcgccggctattaccgcttctcgctgcccaagaagcaattggcggcgctgggcaagcaggtcggccagctggacgataacgagcagctcgcctacgccgatgcgatcaatgcggcgtaccgtcacggcgatgccgacaacgcggccgtgctggcggcgctcgcgcagctggcgccgtcggcatcggcagatgtgtccaccgcgctgctggaccgtttcgggtggatctggcgttaccaggccaccaccgaggcgcagcgcggcgcattgcgcaaggctgccgaacaggcgtatctgccgcgtctgcgtgcgctgggttacgcacggcgcagcggtgagtcgatcgacgacactgcgctgcgcacgtcgctggccagtgtgttcgccttgcgtctgcagaacgctgaggtacgcaaggccctgctggcgcaaggcgatgcggtgctggccggcggcaagggtgcgctggatttctccgccgccaacccggacctgctcggcaccgtactggccgtcactgcccaggaacgcggcgcgccggcagtgcaggcgctgatcgatgcactgcgcacgcatgccgacccggcccagcgcaacgccatgatcgccgcactgggtgcagtgcaggacccggcgctgctgaagcaggtgcgcgattttgcgttgaccgatgcgatcaaggtgggcgagatgaagagcctgctgatgcgcgggcacagcgacgagcgttcgcatgattcgatgtgggcctggttcaccgccaacttcgaccgcatcgtgcaacgcagtggctcgttcgatggcggcgggttgccggcgctgggtgcatccggtggctgcagcgtggaggaggccgaccgcctggatgcgttcttcaagccgcgcctggccaagctcagtggcgccgaccgtggcctggcccagaccggcgagaccatccgcctgtgcgctgcgttggaacaggcgcaaaccgcccagcgctga

SEQ ID NO: 835 - protein, 895 aa, Xanthomonas axonopodis pv. citri str. 306
MPMRRLTCLIAPSLLALCCGTALAQSSGEPVPNGRLPTWAVPERYSLALKIDPEQTQFSGRTTIRVQLKQASDHLWLHGKALKVSKVTVKPGKGKGKALTARYVEADAQTGVARLDFGRTLSPQTLTVEIAYSAPLNQQLQGLYQVKYQGKAYAMTQMEPISARYAFPGFDEPAFKTPFDISLTVPSNDQALANTIATSTKPAGKGWKTVTFAPTVPLPTYLVAYAAGPWDVVDVAPMPATPQRPNATPLRGIAAKGQGPRITPALDQTPAIIAALEDYYAFGYPFDKLDLVAAPDFSAGAMENPGFVTFRDWLLLLDKDSPAENVQRSFNVNAHELAHQWTGDTVTMAWWDDLWLNEAFATWMQQKITMQLHPEYHANLDRIGGAQHAMENDSLVSARKIRQPITGNGDIETAFDGITYQKGAAVLAMFEAFVGEDVFREGMRAYIAKHKFGNATADDLVDAVAQAAGKGDDFKAAFRSFLNQPGVPYLQTQVAREGGKTVVKLQQQRYLPLGSTGSAAQQWGVPVCVKYGKGKNQVGTACQLLEDGSGSIVLEGAGKNTWVFPNARGAGYYRFSLPKKQLAALGKQVGQLDDNEQLAYADAINAAYRHGDADNAAVLAALAQLAPSASADVSTALLDRFGWIWRYQATTEAQRGALRKAAEQAYLPRLRALGYARRSGESIDDTALRTSLASVFALRLQNAEVRKALLAQGDAVLAGGKGALDFSAANPDLLGTVLAVTAQERGAPAVQALIDALRTHADPAQRNAMIAALGAVQDPALLKQVRDFALTDAIKVGEMKSLLMRGHSDERSHDSMWAWFTANFDRIVQRSGSFDGGGLPALGASGGCSVEEADRLDAFFKPRLAKLSGADRGLAQTGETIRLCAALEQAQTAQR

SEQ ID NO: 836 - DNA, 2550 bp, Streptococcus mutans UA159
  CDS (1)..(2550): transl_table=11
atggaaactgtagagcaccttattgaaaagtttgtacctgaaaattataatattttccttgatattaaccgtcaggagaagtttttttcaggaaatgttgctattaacggagaagcgctagataatgttatttccttccatcagaaggatttaacgattcattcggtccttttagataataatgaattaacttatcatattgataatgaaaatgaggctgttcggattgaactgcctgagacaggcagtatgacccttgttcttgaattttcaggtaagattacagacaatatgacaggaatatatccttcttattatacggttgaaaatgttaaaaaagagattatttcaacacaatttgaaagtcactttgcccgtgaagtttttccaagtattgatgaaccggaagccaaggcaacctttgatttagctttgaaatttgatcaggaagaaggagacattgctctttcgaatatgccagagattaatgctaatcgtcgtcaagaaacaggtgtctggacctttgaaacaactccaagaatgtcttcttatctgctggcttttgccttaggtaatcttcatggtaagacggcctatacaaaaggtggaacagaagtaggtgtttttgcaacctgtgcccataatattgactcagttgattttgctttagatattgctgttcgtgttattgatttttatgaagattattatggtattaagtatcctattgcacaggcttaccatgttgccttaccggatttctcagcaggtgctatggagaactggggattaatcacttatcgtgaggtttatcttcttgttgatgaaaattctaccgttagcagccgccagcaggttgcacttgttgttgcccatgaactggcgcatcaatggtttggtaatctggtaactatgaagtggtgggatgacctttggctgaatgaaagttttgccaatatgatggaatatgttgctattgatgctattaaaccaaactggcatatttttgaagactttcagaccagcggtgttcctcatgctttgaagcgtgatgcaactgacggtgttcaatctgtccatgtcgcagttaatcatcctgatgaaatcaatacactttttgatgctgctattgtctatgctaaaggaagccgattgatgcatatgctgcgtcgctggttaggtgacaaagtttttgctgctggactgaaactttactttgaaaagcatcaatacaataacactgttgggcgtgatctgtggaatgctttatcaaccgcttctggtaaggatgttgctagtttcatggatgcttggcttgaacaaccgggctaccccttagtgacacttaaacttgaaggagatagcctgcaactatctcaaaaacaatttttcatcggagaatatgaggatcaagatcgtctttggccaattcctcttaacagcaattggtcaggtttaccggaaatattatcggaaaaaacgattgaaattcctaatttcagtcaattagctgctgtaaataaagaaaaaggaccattacgcttaaatacagataatacagctcattatatcagtaattatgaaggtcagctgttaaaatcaattttatctgattttgagaatcttgataaaacctccaagctgcaaattattcaggaacgtcgtcttctagcagaaagcggtcagatttcttatgctgaattagtaaaattgttaacacaattatctcacgaaacgtcttacatggtcgcttcagctagcgatcaattaattgctggtttaaaacgatttttagatgaagacagccaatcagaatcaatgtttaaagttcttgttcgtgatgtttatcgtacgaattatcaacgcctaggttttgaaaagtccgtggaggaaatggatgaggacgaaaaggttcgtcaaattactatttctaatatgatttatgctgatgatcctgatgccaatgaaaaagcacaagcgatttttgcaaattataaggaaaatattgaagccattccagccgctattcgtcttgacgttttaacgaatcaaataaagcatgccgaaaccgacgatttagtaagtctttatttagattcatacgttaaaacgaatgacagtaattttcgtaggcaattggccagtgctctggcaaatacgaaatcacaaataacacttgatcgtattctagctcaattgcctaatagagatgttattaaaccgcaagatttgtcattatggtatggacttttcttgagaaaatcatttgcacaagaaaccttttgggcttgggcgcgtgagaattgggcttggattaaagccacacttggtggtgatatgagttttgatagttttgtaattattccagcaaatgtctttaagacaccagaacgtctggcagaatacaaagctttctttgaacctcaattggatgatttatccatcagccgtaatattactatgggaattaaagaaatagcagctcgcataacgctaattgaaaaagaaaaagctgctgttgaacaaactattgtcaatacttttttgtaa

SEQ ID NO: 837 - protein, 849 aa, Streptococcus mutans UA159
METVEHLIEKFVPENYNIFLDINRQEKFFSGNVAINGEALDNVISFHQKDLTIHSVLLDNNELTYHIDNENEAVRIELPETGSMTLVLEFSGKITDNMTGIYPSYYTVENVKKEIISTQFESHFAREVFPSIDEPEAKATFDLALKFDQEEGDIALSNMPEINANRRQETGVWTFETTPRMSSYLLAFALGNLHGKTAYTKGGTEVGVFATCAHNIDSVDFALDIAVRVIDFYEDYYGIKYPIAQAYHVALPDFSAGAMENWGLITYREVYLLVDENSTVSSRQQVALVVAHELAHQWFGNLVTMKWWDDLWLNESFANMMEYVAIDAIKPNWHIFEDFQTSGVPHALKRDATDGVQSVHVAVNHPDEINTLFDAAIVYAKGSRLMHMLRRWLGDKVFAAGLKLYFEKHQYNNTVGRDLWNALSTASGKDVASFMDAWLEQPGYPLVTLKLEGDSLQLSQKQFFIGEYEDQDRLWPIPLNSNWSGLPEILSEKTIEIPNFSQLAAVNKEKGPLRLNTDNTAHYISNYEGQLLKSILSDFENLDKTSKLQIIQERRLLAESGQISYAELVKLLTQLSHETSYMVASASDQLIAGLKRFLDEDSQSESMFKVLVRDVYRTNYQRLGFEKSVEEMDEDEKVRQITISNMIYADDPDANEKAQAIFANYKENIEAIPAAIRLDVLTNQIKHAETDDLVSLYLDSYVKTNDSNFRRQLASALANTKSQITLDRILAQLPNRDVIKPQDLSLWYGLFLRKSFAQETFWAWARENWAWIKATLGGDMSFDSFVIIPANVFKTPERLAEYKAFFEPQLDDLSISRNITMGIKEIAARITLIEKEKAAVEQTIVNTFL

SEQ ID NO: 838 - DNA, 2550 bp, Streptococcus agalactiae NEM316
  CDS (1)..(2550): transl_table=11
atgaaaactgtagaacattttgttaccaaatttgtccctgaaaactataaccttttcttggatattaatcgtcaaactaaaaccttttcaggtaacgttgctgtgtctggcgaagccttagataacaatatctcttttcaccaaaaagggttaaccattaaatctgtcttattagataatcaaccattagatttccaactagatgaagacaatgaagctatgcatattcaattgcatgaaactggtagcatggtattagtctttgaattcagcggtcacattaccgataatatgacaggtatgtatccatcttactatacagttaatggcatcaaaaaagaggttatctccacacaatttgaaagtcattttgctcgtgaagtattcccaagtattgacgaaccagaagcaaaagcaacctttgatttgagcctaaaattcgatcaaaaagaaggagagattgctctttcaaatatgccggaaatcaatgctgaacaacgtcaagaaacaggtttatggacatttgacaccacacctaaaatgtcctcatatttattagcttttgccttgggggaattgcatggtaaaacaacacataccaaaaacggcactcttgttggctcatatgccacaaaagcccatcagttaaatgaattagatttttctttagatatcgttgtgcgtgttattgagttttatgaggactactttggtgtacgttatcctattcctcagtcactccacgttgctctacctgatttttctgctggagctatggaaaattggggattagtaacatatcgtgaagtctatcttttagtagatgagaactctagtgtttccagccgtcagcaagtagcattagttgtagcacatgaaatagctcaccagtggtttggtaacctcgttactatgaaatggtgggatgatttatggttaaatgaatcatttgctaatatgatggaatatgtatcaattgattatattgaaccaaaacttaatatatttgaagactttcaaacaggtggtctaccattagctcttaagcgtgatgccacagatggcgtccaatctgttcacgttgaggtcaatcatcctgatgaaattaacacactttttgatccagctatcgtttatgcaaaaggtagccgcctcatgcacatgttacgtcgctggttaggcgatacagattttgccgcaggactaaaaatttattttgaaaaacatcaatatcaaaatactattggtcgtgacctttggaatgcactttctcaaacctcaggaaaagatgttgcagctttcatggattcttggttagagcaaccaggataccctgtgatggcagccaaaatagaagaagatgagctcattttaactcaaaaacaattctttattggtgaacacgaagataagtctcgcttgtggcaaattcctcttaatagtaattgggaaggaatcccagagatattaaccgaggaaacggtagtaatccccaattttagtcagttagctgaaaagaacaaagaaaatggtgcactgcgtttcaatactgaaaatactgcacattacattactaactatcaaggtcaactcttagagcatatcatttctgatcttcctcttatggataacatttctaaactacaaattgtacaagaacgtcatttacttgctgaaagtggtatgatttcatatagtagtttaatacctttagtctctcttttgagccaagagacatcatatcttgttaactctgctattaagagtgttattgatggtttatccttattcgtccaggaagatagccaagatgaattcgactttaaagaatttgttaataaattatcagcatttaattttaatagacttggctttgaaaaaagagaaggagaaggagatgatagcgaaatggtccgtcatctatccctaagccttgctctctactcagataatgaacatgctattgaagaagctcaccatatttttaaagcccacgaaaataatatcgctgctataccagctgcaattcgcctgttagttcttaccaatgaaatgaagcatttcgaatccaaagaacttagccacttgttattagagacttatagtactactaccgatgggaatttcaaacgacaactagcgagtgctttatctcatactacagatagcaagacactcaagaaattattgtcagattggaaaaataaagatattgtgaaaccacaagacttagctatgagttggtatgctactttccttaaaaattcttttacacaacaaagtgtctgggagtgggcccaagaaaactgggaatggatcaaagcaactctaggtggtgatatgagttttgataaatttgtgatttatccctcaagtagtttcaaaacagaagaacgccttgaacaatataaaaactttttcgagcctcaattaagcgatatggcgattagccgtaatatttcaatgggaattaaagaaatttctgctcgtgtccttttaatcacgaagcaaaaagaagaagttatcaatactatcaaaaaatatatctaa

SEQ ID NO: 839 - protein, 849 aa, Streptococcus agalactiae NEM316
MKTVEHFVTKFVPENYNLFLDINRQTKTFSGNVAVSGEALDNNISFHQKGLTIKSVLLDNQPLDFQLDEDNEAMHIQLHETGSMVLVFEFSGHITDNMTGMYPSYYTVNGIKKEVISTQFESHFAREVFPSIDEPEAKATFDLSLKFDQKEGEIALSNMPEINAEQRQETGLWTFDTTPKMSSYLLAFALGELHGKTTHTKNGTLVGSYATKAHQLNELDFSLDIVVRVIEFYEDYFGVRYPIPQSLHVALPDFSAGAMENWGLVTYREVYLLVDENSSVSSRQQVALVVAHEIAHQWFGNLVTMKWWDDLWLNESFANMMEYVSIDYIEPKLNIFEDFQTGGLPLALKRDATDGVQSVHVEVNHPDEINTLFDPAIVYAKGSRLMHMLRRWLGDTDFAAGLKIYFEKHQYQNTIGRDLWNALSQTSGKDVAAFMDSWLEQPGYPVMAAKIEEDELILTQKQFFIGEHEDKSRLWQIPLNSNWEGIPEILTEETVVIPNFSQLAEKNKENGALRFNTENTAHYITNYQGQLLEHIISDLPLMDNISKLQIVQERHLLAESGMISYSSLIPLVSLLSQETSYLVNSAIKSVIDGLSLFVQEDSQDEFDFKEFVNKLSAFNFNRLGFEKREGEGDDSEMVRHLSLSLALYSDNEHAIEEAHHIFKAHENNIAAIPAAIRLLVLTNEMKHFESKELSHLLLETYSTTTDGNFKRQLASALSHTTDSKTLKKLLSDWKNKDIVKPQDLAMSWYATFLKNSFTQQSVWEWAQENWEWIKATLGGDMSFDKFVIYPSSSFKTEERLEQYKNFFEPQLSDMAISRNISMGIKEISARVLLITKQKEEVINTIKKYI

SEQ ID NO: 840 - DNA, 2535 bp, Lactobacillus plantarum WCFS1
  CDS (1)..(2535): transl_table=11
atggcaaccacaactcatttttacgaaacatttcaaccagaacattacaatctttatatcaatattaaccgggcggataagctgatttcggggaaatcaacgattaccggggatgctaaagcgcaggaagtactgattcatcagaatggtttgaccatcgctggtgtccaagccgatggtgcggacgtgcccttcactgtggataacgcgattcaagggattcgaattgaacttgccaaggctggtcaaacaactttgacgattacgtacagcgccaaattgacggatacgatgatgggtatctacccatcatattacgaagtcaacggtgtgaagaaagaactaatcgggacgcagtttgaaacgaccgcggcccggcaagcctttccgtgtgtcgatgaaccagaagctaaagcgacttttgatcttgccatcaagtatgatgaacatgatggtgaaacgatcttaagcaacatgcctgaagatcatgaagccgatggcgtgcattactttgaaaccacggtgcggatgtcgacttacttgattgcgtttgcctttggtgaattacaaggcaagcagacgaagaccaagagtggcgtgaccatcggtgttttcggtactaaggcccacaaggctaacgagctcgactttgctttggacattgccaagcgctcaatcgagttttatgaagatttttatcagacgccatatccattgccacactcatggcaattggccttaccagacttctcagctggcgcgatggaaaactggggcttagttacttatcgggaagcttacttactgttagatcctgacaacacggccctcgaaacgaaacaacgggtcgccacggtgattgcccatgaacttgcccatcaatggttcggtgatttggttacgatgaagtggtgggatgacctctggttaaatgaaagtttcgccaacatgatggaatatgtggcgacggacgccttagaaccagactggcatatttgggaaactttccaaacgtccgaagcatcaatggcgcttcaacgggatgccacggatggggttcagtcagtccacgttcaggtggaagatccggccgaaatcgactcgatttttgacggtgcgattgtctatgctaagggtgcgcggatgttagtaatggcgcgggccttagttggtgatgatgccttacgagcaggtttgaagcagtactttatcaatcataaatatggtaatgccaagggtgatgacttgtggaacgccttagcagatgcttctgggatgcaagttggagacatcatgcattcatggctggaacaacctggctatccagtggtcacggcagcggttgttgacggtcagttgaccttgtcacaacaacagttcttcatcggtaaaggtgaagaagtcggtcgtcaatggcagattccgttgaatagcaactatgaggcggcaccagcgattatgaaggatcaaactgtgacggtcggcgattatgctaaattacgtgatgcgagtgggcaaccattccgcttgaacgttgggaataactcccacttcatcgtcaagtatgaccaaacgttattggatgatattctagcacatgttgatgacttaacggccattgaccagctgcagttgttacaagacttacgcttgttagcggaaggtcgtcaaatctcatacgcagccgttgtgccattattaagccggtttgcagccagccattcaacggtcgttaacgcagcgttgtaccaagttgcgggtaacttacgtaagtttgttacgccagattctgatgaagaaaagcatttacaaacgttatttgaccaattgagtgccgctcaggttaaacggttagggtggttgccacaagcgggtgaatctaacgatgatcagttgacgcggccatacgtcttgagcgcggctttgtacgccaagagcagcgcggccgtattagctgctcatgagttattcgaaggtaatcgtgataagttagcgaccttaccagccgatgtgcgggtcttcattttacggaatgaagtcaagaactttggtagcaaggacttattcgatagtttattgacggcgtcacggcaaacagccgatgctagttacaaggctgacatttgtgacgcattgaccgcaactacggaccccgaattaatcaaacagttagttgtgaagtttgaagatgcggatacgattaagccacaagacttgcgggcctggttccgcggcgtcttggctaatccagctggtgaacaagcagcttgggattggattcgcgacgaatggtcatggttggaagccacggttggtggtgacatggaatttaccacttacatcaccgtcatttcacgggtcttccatacggctgaacgtttagcagaattcaaggcgttctttgaaccaaaaatcaatacgccaggtttaacgcgtgaaattaagatggatactaaggtaatcgccagtcgcgttgccttagttgaggatgaacgtgatgcggtgaatgcagcggtcgcggaagttgtaaaataa

SEQ ID NO: 841 - protein, 844 aa, Lactobacillus plantarum WCFS1
MATTTHFYETFQPEHYNLYININRADKLISGKSTITGDAKAQEVLIHQNGLTIAGVQADGADVPFTVDNAIQGIRIELAKAGQTTLTITYSAKLTDTMMGIYPSYYEVNGVKKELIGTQFETTAARQAFPCVDEPEAKATFDLAIKYDEHDGETILSNMPEDHEADGVHYFETTVRMSTYLIAFAFGELQGKQTKTKSGVTIGVFGTKAHKANELDFALDIAKRSIEFYEDFYQTPYPLPHSWQLALPDFSAGAMENWGLVTYREAYLLLDPDNTALETKQRVATVIAHELAHQWFGDLVTMKWWDDLWLNESFANMMEYVATDALEPDWHIWETFQTSEASMALQRDATDGVQSVHVQVEDPAEIDSIFDGAIVYAKGARMLVMARALVGDDALRAGLKQYFINHKYGNAKGDDLWNALADASGMQVGDIMHSWLEQPGYPVVTAAVVDGQLTLSQQQFFIGKGEEVGRQWQIPLNSNYEAAPAIMKDQTVTVGDYAKLRDASGQPFRLNVGNNSHFIVKYDQTLLDDILAHVDDLTAIDQLQLLQDLRLLAEGRQISYAAVVPLLSRFAASHSTVVNAALYQVAGNLRKFVTPDSDEEKHLQTLFDQLSAAQVKRLGWLPQAGESNDDQLTRPYVLSAALYAKSSAAVLAAHELFEGNRDKLATLPADVRVFILRNEVKNFGSKDLFDSLLTASRQTADASYKADICDALTATTDPELIKQLVVKFEDADTIKPQDLRAWFRGVLANPAGEQAAWDWIRDEWSWLEATVGGDMEFTTYITVISRVFHTAERLAEFKAFFEPKINTPGLTREIKMDTKVIASRVALVEDERDAVNAAVAEVVK

SEQ ID NO: 842 - DNA, 2538 bp, Streptococcus pyogenes SSI-1
  CDS (1)..(2538): transl_table=11
atgaagacagtagaacatctcatcgaaacatttgtgcctgaaaattataacatctttttagatattaatcgtcagactaaaacatttacggggaatgttgcgattaatggtgaagctttagataatcatgtggctttccaccaaaaagatttggacattaagtctattttgctcgataatgaagctgttatttatcaagtggataacgataatgaagttgtgcgtgttgaattacctgaaacaggaatgatgacgcttgtcattgaattttcaggtagcattacagataatatgacaggtatttacccttcatattacactaaaaatggtgagaaaaaagaagtcatttcaactcagtttgaaagccattttgcacgtgaagctttcccatgtattgatgaaccacaagcaaaagctacttttgatttaagcttgacctttgatcaagaaattggtgagatagcgttatcgaatatgccagaagtcaatattgaccgtcgcgaggagactggtctttggacatttgatacgacaccaagaatgtcatcttacttgctagcgtttgcgctaggagaacttcatggaaagactgtagaaagcaaaaaaggaacaactgttggtgtgtatgcgacaacagcgcatcctcttaactcgcttgatttttcattggatattgcagttcgtgttatcaacttttatgaagactattttggagtacattacccaatcccgcaatctcttaatattgcgcttccagatttttcatctggtgctatggaaaattggggtttaatcacttatcgtgaaatttatttattagtagatgaaaattcgactgttcaaagccgacaacaagttgcacttgtaatcgcccacgagatagcacaccaatggtttggaaacttggttacaatgaaatggtgggacgatctgtggttaaatgagagttttgccaacatgatggaatatgtctctatcgaggctattgagccgtcttggaaaataatagaagatttccaaacaggcggtattcctcttgctttaaaacgtgatgctactgatggtgttcaatcagtgcatgttgaagtcaatcatccagatgagataaatacattgtttgatcctgctattgtctatgcaaaaggtagtcgtttgatgcatatgttacgccgttttattggtgatcgtgattttgccattggcttacatcactactttgaaaaatatcaatatcgaaatactgtcgggcgtgatttatggaatattttatcagatacttcaggcaaagacgtagctgcttttatggatgcttggcttgaacaaccaggttatccagttttaacagctcgccttgaaaacgatcaattgattttgagtcaaaaacaattttttattggaaaaggtgaagaaaaaggtcgcctttggccgattcctttaaacactaattggcatggccttcctgaaactttgacagaggcagaaatggtcattccaaactttagtcaattggcagcagaaaatgaaggagctctacgtttcaatattgataatacagctcattacattacagactaccaaggatcattattagatgccttagtcactgaacttgcccaacttgataatacttctgctttacaagttattcaagaacgtcgtttattggcagatagtggcttgatttcttatgctgaattggttgacttaattgctcaattggacgattctaagtcttatatggtagcagaagcggttcagcaagtggtctctggtttgaaacgcttcattgatgaaggaagcttagcagaaaaatcctttaatcgcttggtaaccaccatctatcaagaagactttaatcagcatggttttgagaaaaaagctgacgaatcagatgaagatgagatggtacgtcaggttgccttgggccgcttgtggctagcagaaaatcagacgattattgacggattgagaactatttttgaagcatatcaaaacaatattgcaagtattccagcagctgttcgtcgcttggttttagccaaccaaatgaaatattttgaaacagatagcttggttgatatttattttgagacttatgtagcaactactgataataatttacgcagtgatttaacggttgcttttagtcaaacaaaacaaccaactactattagacgtattcttgttagtttaaaagataaagatattattaaacctcaggatttatcttattggtataatgctttgcttggacaaagctttactcaagatatcatttgggaatgggctagagaaaattgggattggattaaatctgcacttggtggagatatgagctttgataaatttgttatttatccagcaagtaactttaaaacaccaaaacatctagcagaatataaatctttctttgaacctaagctagatgatatggctattagccgtaatattaccatgggaattaatgaaattgaagcacgtgttgctttgatcactaaagaaaaagaagcagttattgcagctctcagtcattactag

SEQ ID NO: 843 - protein, 845 aa, Streptococcus pyogenes SSI-1
MKTVEHLIETFVPENYNIFLDINRQTKTFTGNVAINGEALDNHVAFHQKDLDIKSILLDNEAVIYQVDNDNEVVRVELPETGMMTLVIEFSGSITDNMTGIYPSYYTKNGEKKEVISTQFESHFAREAFPCIDEPQAKATFDLSLTFDQEIGEIALSNMPEVNIDRREETGLWTFDTTPRMSSYLLAFALGELHGKTVESKKGTTVGVYATTAHPLNSLDFSLDIAVRVINFYEDYFGVHYPIPQSLNIALPDFSSGAMENWGLITYREIYLLVDENSTVQSRQQVALVIAHEIAHQWFGNLVTMKWWDDLWLNESFANMMEYVSIEAIEPSWKIIEDFQTGGIPLALKRDATDGVQSVHVEVNHPDEINTLFDPAIVYAKGSRLMHMLRRFIGDRDFAIGLHHYFEKYQYRNTVGRDLWNILSDTSGKDVAAFMDAWLEQPGYPVLTARLENDQLILSQKQFFIGKGEEKGRLWPIPLNTNWHGLPETLTEAEMVIPNFSQLAAENEGALRFNIDNTAHYITDYQGSLLDALVTELAQLDNTSALQVIQERRLLADSGLISYAELVDLIAQLDDSKSYMVAEAVQQVVSGLKRFIDEGSLAEKSFNRLVTTIYQEDFNQHGFEKKADESDEDEMVRQVALGRLWLAENQTIIDGLRTIFEAYQNNIASIPAAVRRLVLANQMKYFETDSLVDIYFETYVATTDNNLRSDLTVAFSQTKQPTTIRRILVSLKDKDIIKPQDLSYWYNALLGQSFTQDIIWEWARENWDWIKSALGGDMSFDKFVIYPASNFKTPKHLAEYKSFFEPKLDDMAISRNITMGINEIEARVALITKEKEAVIAALSHY

SEQ ID NO: 844 - DNA, 2706 bp, Gloeobacter violaceus PCC 7421
  CDS (1)..(2706): transl_table=11
gtgcgagtattccgtgaaaaggtgcaggtatccatgtttcgccaactgacgggtcttacggggctggccatcatcgctgtgctggcagtgccggcacaggccgagccaaaattttcgtttgcgaccacccccgggcagctgccgcgcgatgtgattccgacacgctacgcggtcgagatcaccccggaccccaaaagtttgaccacgatcggcaccgaagtgatcgacatcgaggtgcgcaagcccacccgcaccgtggtgctcaacgccctcaacctcaaagtcgacaaagcccgcctcgacggccaactacccggcaccgtcaaaatcgatccggcgaagcagaccgccaccatcacctttgcccggccgattgcgaccggtccccacaaactttccctggcctttgtgggccaggtgaacgcccaggccgaggggctctactacgtgcgctacaaaaccgacaaaggcgagaagctgatgttcggcacccaaatggagcccaccgacgcgcggcggatgtttccgctgtgggacgagccggtcttccgcacgccctttgccctcacggtcaatctgcccgagaacttcaaggcggtctccaacatgcccgtggcgagcgagaagcgcctggggggcggcctcaaatcgattgccttcgcccctaccccgaagatgcccagttatctgctggtgctgtgcgcgggtgaattggaatccctcgatgaccaggcgtcgggggtcaaaatcggcgtggtcaccaccgaaggcaaaagccagaacggccgctacgcccaggaggcgcttaaaaagcttctgccctactacaacgactacttcggcgtgggttacgccctgcccaagctcgaccagatagccgtccccggcggatttggcggcgcgatggaaaactggggcggcatcacctacaacgaagcgattttgctctacgacccggcccgctcctcccagagcaccaaagaagcgatcttcaacgtcgtcgcccacgaagtggcgcaccagtggttcggcaacctggtgacgatggcctggtgggacaatctctggctcaacgaaggcttcgcctcctggatggacaccaaggccaccgaccacttcaaccccgagtgggaagtctggctgcgggcgaacgccgccaaaaatgtcgccatgcagtccgacgcccgctccaccacccatcccatccagcagccggtcaccgatccggcccaggcggcgagcgccttcgacgagatcacctatcaaaagggcgaagcgttcatccgcatgctcgaagcctacctgggcgaagccaaatttcgtgacggcatccgccgctacatgaaggcccacaccctctcgaacaccaccaccgccgatctgtgggcggcgctcgaagaggcttccggccagccggtgcaggcgatcgccgccggctggaccgagcagccgggctttccggtggtgacggtgtcctcgcgctgcgaggggggcaagcaacggctcgccctcaggcaggaccgcttcaccgtcaacgacccgaacgccaaggcgctgttgtggaaggtgcccatcacctacggcgaagtgggcagcgacaaagtggaatcttttttgctcgccgataagacggccaccaccaccgccgagggttgcggagcgccagtcaagctcaaccggggcgacacgggctactaccgggtgaagtatgagggcgacctgttcaatcagctcaagcaaaatttctcgcgcctgcagacggcggaccgggtgaatttgctcagcgacacctgggcattggtgcaggcgaagcaggcgggggcgcgcgactacctgagcctggcggaggcggccaaagcggataccaacctggcggtctggcagcagatcctcgccaccctgggtgaaatcgaccggctgcaaatcggccagccgggccgcgagcctttccagacctatgcccgggcgctgttgcaaccggtctaccagcgcgtcggttgggacgcccaacccggcgagctcgagacgaccggcctgctcaggagcagcgtgctcgcttccctgggcaagttcaaagacgaagccgtcgtcgccgaggcgcgccgccgcttcgaagcttttgtgcgcgcccccgagtcgcttgcccccaacctgcgtccgccggtgctgagcgtcgtgggtcgttacgccgaccaggccacctacgatcagttgctttcgctggctcgcaaaacccagagcaccgaagagaagcgcaactactacgcggcgctggccggggcgctcgacccgaaactcgctcagcagacattggcgctttcgctcaagagcgaggaggagcccaacctgtccaccaacctggtgctgcaggtggccggcagcggcgagcaccgggagatggcctgggagttcgccaagcaaaactataaagccctgctcgacaagcgtgcctttttcaaccgctacaagtacctgccgggactggtggccaacttcaccgagccggagcgcgcccaggaattcgaggcgttcgccaaggccaacctcccggcggaggcgctgccggaggtgagcaagggtgccgagttcgtccgcgcttccgccgggatcaaggagcaacagatgggcgaagtcgacagctgggcctgcagcaggaccaaaatcgaaggcggcaaaggcacccagttctgcctgggggtgaactga

SEQ ID NO: 845 - protein, 901 aa, Gloeobacter violaceus PCC 7421
MRVFREKVQVSMFRQLTGLTGLAIIAVLAVPAQAEPKFSFATTPGQLPRDVIPTRYAVEITPDPKSLTTIGTEVIDIEVRKPTRTVVLNALNLKVDKARLDGQLPGTVKIDPAKQTATITFARPIATGPHKLSLAFVGQVNAQAEGLYYVRYKTDKGEKLMFGTQMEPTDARRMFPLWDEPVFRTPFALTVNLPENFKAVSNMPVASEKRLGGGLKSIAFAPTPKMPSYLLVLCAGELESLDDQASGVKIGVVTTEGKSQNGRYAQEALKKLLPYYNDYFGVGYALPKLDQIAVPGGFGGAMENWGGITYNEAILLYDPARSSQSTKEAIFNVVAHEVAHQWFGNLVTMAWWDNLWLNEGFASWMDTKATDHFNPEWEVWLRANAAKNVAMQSDARSTTHPIQQPVTDPAQAASAFDEITYQKGEAFIRMLEAYLGEAKFRDGIRRYMKAHTLSNTTTADLWAALEEASGQPVQAIAAGWTEQPGFPVVTVSSRCEGGKQRLALRQDRFTVNDPNAKALLWKVPITYGEVGSDKVESFLLADKTATTTAEGCGAPVKLNRGDTGYYRVKYEGDLFNQLKQNFSRLQTADRVNLLSDTWALVQAKQAGARDYLSLAEAAKADTNLAVWQQILATLGEIDRLQIGQPGREPFQTYARALLQPVYQRVGWDAQPGELETTGLLRSSVLASLGKFKDEAVVAEARRRFEAFVRAPESLAPNLRPPVLSVVGRYADQATYDQLLSLARKTQSTEEKRNYYAALAGALDPKLAQQTLALSLKSEEEPNLSTNLVLQVAGSGEHREMAWEFAKQNYKALLDKRAFFNRYKYLPGLVANFTEPERAQEFEAFAKANLPAEALPEVSKGAEFVRASAGIKEQQMGEVDSWACSRTKIEGGKGTQFCLGVN

SEQ ID NO: 846 - DNA, 2673 bp, Magnaporthe grisea 70-15
  CDS (1)..(2673)
atgtcggctcgtgatatcctcccggacaacttccgtcccgtcaactatgacctccagcttaccgatctggactttgacaattggtcctacaacggaaccgttgagatttctggtgaactcaccaagccgactactgagatcgtactcaatgtattggagatcaagctcaaggaggctcaactggaaatccagggcaccaaggcaactgtgagccagagcacccaaaacttcacttacaatgacaaacaacaacgcgccaccatggtcttcgaggaggagattcctccttcagccaaggccagcctcaagatcaagttctccggtctcataaaccatgatatggccgggttttaccgcagcatgtacaagcctgcggttcccgcagctgcctcagttccacgagacgaacagttccactatatgctcagcacccagttcgaggcatgtgatgctcgccgcgcttttccctgctttgacgagcccaacctcaaggccacctttgatattgccatcgagatcccaagcgatcaggttgccctgagcaacatgcccgtaaaggagtccaaggagacggcgccagggaagacactcgtctcctttgaccgtacccccgtcatgagtacctacctggttgcttgggccgtcggtgactttgaatacatcgaggcttttaccgaaaggcggtacaacggcaagcagctccctgtgcgtgtctacaccacccgtggcctcatcgaacagggtcgctgggcgttggagcacgcacccaaggttatcgactactttagcgagcagtttgagatcgactacccgctgcccaagtccgacattcttgccgtgcacgagtttacccacggtgccatggagaactggggtttggtaacataccggactacggctgtacttttcgacgagaagctgtctgatgttcgattccgcaaccgcgttgcctacgtggttgctcacgaattggctcatcagtggttcggcaaccttgtgactatggactggtgggacgagctttggctcaatgaaggctttgctacctgggcaggatggctcgctactgattacctccaccctgactggaatgtctggcctcagtttgtcaacgagggaatgggcatggcattcgagcttgactccattcgcgcctcgcaccctatccaggtccccgttcgcgatgcacttgacgtgaaccagatcttcgaccatatctcatacctcaaaggatgcagtgtaattcgcatgctggcgtcgcatcttggtgtccgcaccttcctcaagggtgttgctatgtacctcaagaagcaccagtaccacaatgccaagactgacgcattatggtcggccttgagcgaggcgtctggcactgatgttaacgctcttatggcgccctggattgagaagatcggacatccagttcttacggttacggagaagtccagtgatggcgccatcagcgtcaagcaatcgcgattcctgtccactggcgacgtcaagcccgaggatgacaccaccacttggtggattcctctggcgttgtcgggcaaggtcggcacagccgaaggcgaagtgcagtctctttctctgacaaccaaggaggagactatcaccggtgtcagcgatgaattctacctgctcaactccaacgcaactggattttaccaggtgaactacccagcagagcgtctggcaatctttgccaagcagcttgaccgtctgggcccagcggacaagattcgcatctcttcgtctgcatcagaccttgccttttccggatacgcaaagacttcatctctgctgtccttcctggagggcttcagcaatgagacggaatatctcgttcttgcgcaggctcttgacgcagttgccactctcaagtccgtatttggcgaggatgatggcattcgtgctggtctgaatgcattctcgttgaagcttatcgagaaccaggttgacaaactcagctttgacgtacctgcgaatgacagttacaccaacagcctcctacgaaagaggattctattggccgcagtttcaaacggccacgagggtgtaacggctgaggccaagaaacgattcgacgcctatttcaacaatggagacaagtcagctgtgcacgccgacctgcgcattacatgctaccgagcagccatcctcagcgacccagcgaccgctgtccagacgctcaagaaggaatgggcagaaaccaaggccgtggatggaagggaggtgtgcctcggtgccctgggccatgttcaggatgctgccatcatcaaggatgttctcctgccgttcctcttcgatgcttccccggatgctgtgccgccggccgatgtgcacatcatggccacggcgctggctgcgaaccgggtgggccgcccactcttgtgggagcgcctgcgcgacgattgggaaaactcggtggtcaagaagcttggaggcaaccctattctggtcgaccgcctggtcaagaactcgctgggcaagttcacagatgccaaggtcgtcgacgatatcacggccttcttcagcaaccaggacacgtcgggtttcaacaggactttggaaaccgtcaaagacaaggttcggggcagagcgtcgtacaaggaaagggacgcccaagtcctgaaggaatggctgaaggagaatggatacttgaacaaatag

SEQ ID NO: 847 - protein, 890 aa, Magnaporthe grisea 70-15
MSARDILPDNFRPVNYDLQLTDLDFDNWSYNGTVEISGELTKPTTEIVLNVLEIKLKEAQLEIQGTKATVSQSTQNFTYNDKQQRATMVFEEEIPPSAKASLKIKFSGLINHDMAGFYRSMYKPAVPAAASVPRDEQFHYMLSTQFEACDARRAFPCFDEPNLKATFDIAIEIPSDQVALSNMPVKESKETAPGKTLVSFDRTPVMSTYLVAWAVGDFEYIEAFTERRYNGKQLPVRVYTTRGLIEQGRWALEHAPKVIDYFSEQFEIDYPLPKSDILAVHEFTHGAMENWGLVTYRTTAVLFDEKLSDVRFRNRVAYVVAHELAHQWFGNLVTMDWWDELWLNEGFATWAGWLATDYLHPDWNVWPQFVNEGMGMAFELDSIRASHPIQVPVRDALDVNQIFDHISYLKGCSVIRMLASHLGVRTFLKGVAMYLKKHQYHNAKTDALWSALSEASGTDVNALMAPWIEKIGHPVLTVTEKSSDGAISVKQSRFLSTGDVKPEDDTTTWWIPLALSGKVGTAEGEVQSLSLTTKEETITGVSDEFYLLNSNATGFYQVNYPAERLAIFAKQLDRLGPADKIRISSSASDLAFSGYAKTSSLLSFLEGFSNETEYLVLAQALDAVATLKSVFGEDDGIRAGLNAFSLKLIENQVDKLSFDVPANDSYTNSLLRKRILLAAVSNGHEGVTAEAKKRFDAYFNNGDKSAVHADLRITCYRAAILSDPATAVQTLKKEWAETKAVDGREVCLGALGHVQDAAIIKDVLLPFLFDASPDAVPPADVHIMATALAANRVGRPLLWERLRDDWENSVVKKLGGNPILVDRLVKNSLGKFTDAKVVDDITAFFSNQDTSGFNRTLETVKDKVRGRASYKERDAQVLKEWLKENGYLNK

SEQ ID NO: 848 - DNA, 2652 bp, Magnaporthe grisea 70-15
  CDS (1)..(2652)
atgtgcaaactccacgacatcgagatgggaggtggggtcggcgcaaacaacgccaccgggagagagctcctgcccaccaacgttgtgcccaagcactatgacttgactctcgaaccggacttggaaaagttcacctttaatggcagtgttgtagttcacttggacgtggccgaagactccaagtcaatctccctacacaccctcgagattgatgtgaagaatgccaaggtcacatctggaggacaaaccattacatcgcccaagatctcgtacaatgaggacacacaggtcaccaagatcgactttgacgaaaccatcagcaaaggcagcaaagccgagctgacaatcgacttcaccgggactttgaacgacaagatggctggcttctaccgtgctgtctacaagagggatgatggttcagagggtgtcctcgccgtctcacagatggagcctacagatgcacggagagctttcccttgttttgatgagccctctctgaaggccacctttgcagtcactcttatcgccgacaagaagctgacttgtctgagcaatatggatgttgcttccgaaagtgaggttcagtctgcattgactggcaccaccaagaaagctgtcaagttccacaactcgcccctcatgtctacatacctcctcgccttcattgtgggcgagctcaactacatcgagaccaaagacttccgtgtgcccgtccgtgtttacgcgccgcccggcctcaacatcgagcatggccgtttctcgctgaacctcgctgccaagacgctggcgttttacgaaaaggttttcggtatcgacttccccctgcccaagatggaccaggtcgccattcccgattttgcccagggagccatggagaactgggggcttgtcacttaccgtgttgtcgaccttcttctggacgaaaaggttagcggggctgccaccaaggagcgtgttgccgaggtggtgcagcacgagctggcgcaccaatggttcggtaacctggtcacgatggactggtgggatggactctggctgaacgagggcttcgccacgtgggcctcgtggtactcgtgcaacgtcttcttccccgaatggaaggtctgggagtcatacgttacagacactctccagtcagcattgtctctcgactctctgaggagcagtcacccgatcgaggttccagtgaagcgtgcggacgagatcaaccagatctttgattccatcagctacgccaagggctcgtgcgtgcttcgcatgatctcgacgtacttgggcgaggatgttttcctcgagggtgtcaggcaatacctcaagaagcacgcatacggcaacacgcaaacggatgacctgtgggactcgctcgccaaagcaagcggcaagccagttcacgaggtgatgactgcctggaccaagaacgtcggctaccccgtcatcactgttacggagaacgagaaagacagcagcatccacctgaagcagaaccgcttcttgaggactggtgacaccaagccggaggaggaccaggtgctttaccctgttctgcttggcctgcgtaccaaggacggcatcgatgagtctaggacactcaccgctagggagaacgacttcaagctgcccgacgtggactttttcaagctcaatgccaaccacacaagcctgttccgtaccgcatactctccggagcgactggagaagttgggcaacgctgccaggaatggattgctgtcggtcgaggaccgcgctggcatgcttgctgatgccggcgctctggccgtttcgggctaccaaaagacttcgggcgttttgaacctgctcaagggctacgactcggagtcgcagtttgtggtttggaccgagatcattggtcgtctcgccgccgtgcacagcgcctggatctttgaggacaaggctatcaaagacagcctcgaggcgttccagcgagacctgatcagctccagggcccacaagatgggatgggccttctcggaaagcgatgggcatatcgagcaacagttcaaggcgctcctctttggatcggctggaatcgctggtgacaaggacattgttgctgctgccaaagatatgttcaagaagtttatggatggcgacaagtctgccattcaccccaacattcgtggcagcgtttttgccatggctttgaagtatggcggtgacgatgagtacaaccgtatcctcgacttctaccgtacttctaccaacagcgatgagcgcaacacggcgctccgaagccttggccggtccaacaagccggagcacatcaagcaaaccctcgacctgatgttcagcggcgaggtcaaggatcaggatatctatatgcccgctgccggcctgcgcagccactcggaaggtatcgaagccctgagcaagtggataatggacaactgggacgcactttacatcaagcttcctccagcactgtccatgcttggaagcatggtagccatctgcacgtctagcttgaccaagccggagcaactgaagcaggttgaggagttctttgccaacaaggacaacaaggggtacgagatgtctctggcccagagcttggatgccattcgctccaagattgcctggctcgagcgtgatcgtagtgatgtagccgcctgggtcaaggaacaaggatactag

SEQ ID NO: 849 - protein, 883 aa, Magnaporthe grisea 70-15
MCKLHDIEMGGGVGANNATGRELLPTNVVPKHYDLTLEPDLEKFTFNGSVVVHLDVAEDSKSISLHTLEIDVKNAKVTSGGQTITSPKISYNEDTQVTKIDFDETISKGSKAELTIDFTGTLNDKMAGFYRAVYKRDDGSEGVLAVSQMEPTDARRAFPCFDEPSLKATFAVTLIADKKLTCLSNMDVASESEVQSALTGTTKKAVKFHNSPLMSTYLLAFIVGELNYIETKDFRVPVRVYAPPGLNIEHGRFSLNLAAKTLAFYEKVFGIDFPLPKMDQVAIPDFAQGAMENWGLVTYRVVDLLLDEKVSGAATKERVAEVVQHELAHQWFGNLVTMDWWDGLWLNEGFATWASWYSCNVFFPEWKVWESYVTDTLQSALSLDSLRSSHPIEVPVKRADEINQIFDSISYAKGSCVLRMISTYLGEDVFLEGVRQYLKKHAYGNTQTDDLWDSLAKASGKPVHEVMTAWTKNVGYPVITVTENEKDSSIHLKQNRFLRTGDTKPEEDQVLYPVLLGLRTKDGIDESRTLTARENDFKLPDVDFFKLNANHTSLFRTAYSPERLEKLGNAARNGLLSVEDRAGMLADAGALAVSGYQKTSGVLNLLKGYDSESQFVVWTEIIGRLAAVHSAWIFEDKAIKDSLEAFQRDLISSRAHKMGWAFSESDGHIEQQFKALLFGSAGIAGDKDIVAAAKDMFKKFMDGDKSAIHPNIRGSVFAMALKYGGDDEYNRILDFYRTSTNSDERNTALRSLGRSNKPEHIKQTLDLMFSGEVKDQDIYMPAAGLRSHSEGIEALSKWIMDNWDALYIKLPPALSMLGSMVAICTSSLTKPEQLKQVEEFFANKDNKGYEMSLAQSLDAIRSKIAWLERDRSDVAAWVKEQGY

SEQ ID NO: 850 - DNA, 2955 bp, Gibberella zeae PH-1
  CDS (1)..(2955)
atgtcgtcgtccatgggccttttgcgccatctccaggctcagcaacagcgtctgtggagctgttgtagtccactatcggtgattacacggcagacgtcagccgcggctgcttctgcttctgtccctcaaggtattttcaatggtataggttttggatttgcgagaggtttgacttcgcttgtaaacggtggtcagccgttgagcaaccgtcgagataatggacggcctatgccgatcggtatccggagtcttgtccccaagatctctgatcgagcttgttccgcccacgctagactcgcccgcaacgaaacaatgactgaccgcgacgttctccccgacaatgtcaagcccaagcactaccagctgtccttgagggacctcgagttcaccaactggacttacaagggaaccgtcaccatcgactctgaaatcaccaagcctaccaaagaaatcatcgtaaacaccctcgaacttaagctctctcacgccaaggtcttcgtcgactctaagttggtggaatccacaaagtttgactatgacgccaaggcccaacgctctaccatctcctttgacgaggagctccctgtcgcttccaaggctgtcatcaccatcgagttcgagggtatcatcaacaatgaaatggctggtttctaccgcagcaagtacaagcctaccggtactccttccgcttctgttcccgacgatggcgaatggcactacatgttcagcacccagttcgaggcttgcgacgctcgccgagctttcccctgcttcgacgagcccaacctcaaggccacctttgactttgacatcgagattccttccgaccaggttgctctgagcaacatgcctgtcaaggagactcgaccttccaaggacggctggaacattgtgtcattcgagacctctcccgtcatgagcacctaccttttggcctgggctgttggtgactttgagtacatcgaggctttcactgatcgcaagtacaacggcaagcagattcccgtccgtgtctacaccacccgtggtctcaaggagcagggtcagtgggctcttgagcacgcccccaagatcattgacttcttctccgagatctttgacattgactaccctctgcccaagtccgatttgatcgctgtccacgagttcactcacggtgccatggagaactggggtcttgttacctaccgtactacccaggttctctacgacgagaagacctctgaccctcgattcaagaacgctgttgcctatgttgtcgcacacgagcttgcccaccaatggttcggtaacctcgttaccatggactggtgggacgagctctggctcaacgagggttttgctacctgggtcggttggcacgctgttgaccacctgcaccctgactggcaggtttgggctcagtttgtcaacgagggtatggaggctgctttccgtctcgacggtattcgtgccagtcaccctatccacgttcctgttcgtgatgctcttgatgtcaaccaaatctttgactctatcagctacctcaagggttgctccgccattcgcatgctcgccaaccaccttggtgtcgaggttttcctcaagggtgtgtccaactacctgaagtctcacgcctacggtaacgccaagaccactgccctgtgggacgctcttggtgaggcttcaggcaagaacgtgactgagctcatgaacccttggatctccaagattggccaccccgttcttactgttgctgaggagcctggtcagatctctgtcaagcagtcccgattcctgtctactggcgatgttcagcctgaggatgacaccaccacttggtgggttcctcttggtctggagggcaagaaggaccacgccggtgtcgcttccctgtctcttaccagcaaggaggacaccattcgtgatgttgatgaggacttttacaagctcaacagcggcgccactggtttctaccgtgtcaactacccccctgggcgtcttgctaagctgagcactcagctcgacaagcttagcactgaggacaagatttccattattggttccactgctgaccttgcctttgctggtaacggtaccacccccgctctgctgaccttccttgagggcttcggcaaggagacccacactcttgtctggcgccaggtccttgactccatcagtggcgttaagtctgtcttcggagaggacgagtccatcaagaaggcccttgacaacttcaccctgaagctcattaacgagaaggtcaaggaggttggctgggagttccccgagggtgaggactacctcactggcatcctgcgaaaggagattatcggcgttgctgtcgccagcggccactctgctgttactgaggaggctctgaagcgcttcaacgcctgggttgaggaccctgaggctaaccctattcctgcccctcttcgtgttgctgtctggcgcgctgccatgatcaaggagcccgctcgcactgttgagatcctcaagaaggagtggctcaacaccaagtccatcgacggcaagctcctctcccttagcgttcttggcacggtcaaggatgccgagatcctcaagaaggatgtcattcccttcaacttcaaccaatctcccccgtctaacgctgtccctgctggagacatgcacgttctgggtggctccgttgctaacaacgttgttggccgacccgttcagtggcaattcatgaaggacaactgggatgctgtcatcactaagctcggtaaccccgtcgttgtcgaccgatacatgaacctcagtctgagccgcttcaccgatgtttccgctgttgaggacattgagaagttcatggccgacaaggacaccagcagcttcaaccgtactcttggtaccgtcaaggacaagattcgcggacgtgctgcttaccgcgagcgtgactctgagaagctcaaggagtggctcagcgcccatggatacgcttga

SEQ ID NO: 851 - protein, 984 aa, Gibberella zeae PH-1
MSSSMGLLRHLQAQQQRLWSCCSPLSVITRQTSAAAASASVPQGIFNGIGFGFARGLTSLVNGGQPLSNRRDNGRPMPIGIRSLVPKISDRACSAHARLARNETMTDRDVLPDNVKPKHYQLSLRDLEFTNWTYKGTVTIDSEITKPTKEIIVNTLELKLSHAKVFVDSKLVESTKFDYDAKAQRSTISFDEELPVASKAVITIEFEGIINNEMAGFYRSKYKPTGTPSASVPDDGEWHYMFSTQFEACDARRAFPCFDEPNLKATFDFDIEIPSDQVALSNMPVKETRPSKDGWNIVSFETSPVMSTYLLAWAVGDFEYIEAFTDRKYNGKQIPVRVYTTRGLKEQGQWALEHAPKIIDFFSEIFDIDYPLPKSDLIAVHEFTHGAMENWGLVTYRTTQVLYDEKTSDPRFKNAVAYVVAHELAHQWFGNLVTMDWWDELWLNEGFATWVGWHAVDHLHPDWQVWAQFVNEGMEAAFRLDGIRASHPIHVPVRDALDVNQIFDSISYLKGCSAIRMLANHLGVEVFLKGVSNYLKSHAYGNAKTTALWDALGEASGKNVTELMNPWISKIGHPVLTVAEEPGQISVKQSRFLSTGDVQPEDDTTTWWVPLGLEGKKDHAGVASLSLTSKEDTIRDVDEDFYKLNSGATGFYRVNYPPGRLAKLSTQLDKLSTEDKISIIGSTADLAFAGNGTTPALLTFLEGFGKETHTLVWRQVLDSISGVKSVFGEDESIKKALDNFTLKLINEKVKEVGWEFPEGEDYLTGILRKEIIGVAVASGHSAVTEEALKRFNAWVEDPEANPIPAPLRVAVWRAAMIKEPARTVEILKKEWLNTKSIDGKLLSLSVLGTVKDAEILKKDVIPFNFNQSPPSNAVPAGDMHVLGGSVANNVVGRPVQWQFMKDNWDAVITKLGNPVVVDRYMNLSLSRFTDVSAVEDIEKFMADKDTSSFNRTLGTVKDKIRGRAAYRERDSEKLKEWLSAHGYA

SEQ ID NO: 852 - DNA, 2574 bp, Candida glabrata CBS 138
  CDS (1)..(2574)
atgaacagcgaaaacagggaagttcttccaactaacgtgactccaattcactataatttatctttggaaccaaattttgaaacgtttaaatttcatggtttggaagaaattaatctgaaagtcaacgacaagacaaatgatgtcatcactttgaatagcatcgagattgacattcatagtgctaagctggacgatgttgaacctaagcagacgaagtttgaccatgacaaacaaactgtcgaatttgtgttccctgaaggtactttggccaagagtaatgatccgactttgaagttggatttcaccggtattctgaacgataatatggctggcttttacagagccaagtaccaggacaagaaaacaggcgaaacaaaatatatggcaaccactcagatggaacctactgatgcaagaagagcattcccatgtttcgatgaaccaaatctgaaagcaacttttggtattacattaatatctgatccatctttaacccatctatccaatatggatgtcaagaatgaaaccatctctgaaagtaagaaggtcactactttcaatgatactccaaagatgtctacttatctagttgcatttattgttgctgagctaaattatgttgagaataaagaattccgtatccctgtaagagtctatgctacaccaggagatgaacatttaggccagtatgctgctgatctaacggcaaagacactagcattctttgaaaagactttcggcatcaaataccctctaccaaaaatggacaatgtcgcagtgcatgaattttctgcaggtgcaatggaaaattggggtttagttacctaccgtgttgttgatttattattagatgaagaaaactcttctctagaccgtattcaaagagttgccgaagtagttcagcatgagttagcgcatcaatggtttggtaacctagtcaccatggattggtgggaaggtttatggctaaacgaggggtttgctacgtggatgtcttggtactcttgtaatgaatttcaaccaagttggaatgtctggcaacagtatgtcactgatactttgcagcatgctctttctttagacgctttgaggtcatcccatccaattgaagtcccagtgaagagggcagatgaaatcaatcaaatttttgatgcaatttcatattctaagggtgcttctttattaagaatgatctctaaatggttgggtgaagacgtcttcattaaaggtgtctcgaactatttgaacaactttaaatatgggaatgcaaagactgatgacttatgggatgctttggctaaagcttctggtaaagatgttcgtggtgtcatgaatatttggaccaagaaggtaggctttcctgtcatttctatcgaagaaaatggctctgaaattcaatttacccagaaccgctatctcactactggtgatgtaaagccggaagaagatgaaactttataccccgtatttttggcattgaagacaaaatctggtgttgataattcgttggtgttgtcggagcgttccaaggcagttactattgatgactcatcgttctacaaagtcaacacagaccaatccggtatcttcattacagcgtatccagaagatagatgggaaaagtttggcaaacaatctgatttgttgtcagtagaagaccgtacaggtcttgtcgctgatgcaaaggccctttcatcttctggctacataaacactacaagcttcttcaaattgatttctaactggaaagatgagaaatcttttgttgtttgggatcaaataatcatcagtcttgcatcattgaaggctgcatggctttttgaatcccccgaagtgaaagatgctttggaagccttctccagaaacttggtagcagacaaggcaaagacattaggttgggagtttaaggaatccgactcttttgctactcaacgtttgaaggttgctttattcggagctgcatgtgccgctagagatgaggttgttgaaaaggcagcattagatatgtttgaaaaatacgtcagtggagacaagaaggcaattccagcactaattaaaccatctgtatttaatgcagttgctagaaagggtggtaaggataactatgaaaagatctttaatatttataagaaccctgtttccactgacgaaaaattggctgccttaagaactttgggtagatttaaggaagcagatctacttgacagaacattgggctatctgtttgatggaactgtcttaaaccaagacatttacatcccaatgcaaggtatgagagctcacaaagaaggtgtcactgctttatggaaatggttacaagaaaactgggacgagattgcgagaagattaccacctggcttatctatgctgggttctgttgttgctatttctacttctggattctcttcattagaagctgttgatgaaatcaagacattcttcaacactaagtcaaccaaaggttttgaccaaagtttggctcaatctcttgacactattacctctaaagcccaatgggttgatagagacagagaatccatttccaagtatttgtcagataatggttacatgtaa

SEQ ID NO: 853 - protein, 857 aa, Candida glabrata CBS 138
MNSENREVLPTNVTPIHYNLSLEPNFETFKFHGLEEINLKVNDKTNDVITLNSIEIDIHSAKLDDVEPKQTKFDHDKQTVEFVFPEGTLAKSNDPTLKLDFTGILNDNMAGFYRAKYQDKKTGETKYMATTQMEPTDARRAFPCFDEPNLKATFGITLISDPSLTHLSNMDVKNETISESKKVTTFNDTPKMSTYLVAFIVAELNYVENKEFRIPVRVYATPGDEHLGQYAADLTAKTLAFFEKTFGIKYPLPKMDNVAVHEFSAGAMENWGLVTYRVVDLLLDEENSSLDRIQRVAEVVQHELAHQWFGNLVTMDWWEGLWLNEGFATWMSWYSCNEFQPSWNVWQQYVTDTLQHALSLDALRSSHPIEVPVKRADEINQIFDAISYSKGASLLRMISKWLGEDVFIKGVSNYLNNFKYGNAKTDDLWDALAKASGKDVRGVMNIWTKKVGFPVISIEENGSEIQFTQNRYLTTGDVKPEEDETLYPVFLALKTKSGVDNSLVLSERSKAVTIDDSSFYKVNTDQSGIFITAYPEDRWEKFGKQSDLLSVEDRTGLVADAKALSSSGYINTTSFFKLISNWKDEKSFVVWDQIIISLASLKAAWLFESPEVKDALEAFSRNLVADKAKTLGWEFKESDSFATQRLKVALFGAACAARDEVVEKAALDMFEKYVSGDKKAIPALIKPSVFNAVARKGGKDNYEKIFNIYKNPVSTDEKLAALRTLGRFKEADLLDRTLGYLFDGTVLNQDIYIPMQGMRAHKEGVTALWKWLQENWDEIARRLPPGLSMLGSVVAISTSGFSSLEAVDEIKTFFNTKSTKGFDQSLAQSLDTITSKAQWVDRDRESISKYLSDNGYM

SEQ ID NO: 854 - DNA, 2574 bp, Candida glabrata CBS 138
  CDS (1)..(2574)
atggatcgtgaaattctgcctagtaatgtcactccactgcactacgatttagtgctggagccatcttttgaaacttttaagtttgatggttctgtaaccattgacctacaggtcaatgatagtactgtggactctatcagtctgaacacccttgagattgatatcaaggctgtgacactggatggttccatcactccaagtgaaatcaaggttgatgaagctgcccaagtcaccgaatttgtctttgagaaaggtaccctgtctgagaagaaatcagtcaaactggagatcaagttcattggtatcctgaatgatcagatggcaggtttctacagagccaagtacgaggacaagcagactggtgagaccaaatatatggccaccacccagatggaagcaactgatgctagaagagctttcccttgttttgacgagccaaacttaaaatcaacctttgatgtgactttgatttctgacaagcatttgactcaattgtccaatatggatgtcaaatctgagactattgagggtgaaaagaagattacaaagtttaacacaactccaaagatgtctacttatctgattgccttcattgttgcagaattgaagtatgttgaaagtaaagaattccgtattcctgtgcgtatttattctactccaggtgatgaacatctaggtgagtttgcagcttcattgactgctagaacattgaaattttttgaatccacatttgatattgagtatcctcttccaaagatggatatggttgctgttcatgaattctcagctggtgcgatggaaaactggggtctagtgacttacagggtcgtcgatttactacttgataaggagaactccactctggaccgtatccaaagagttgctgaagttattcaacatgaattggctcatcaatggtttggtaacttggttaccatggattggtgggaaggtctgtggctaaacgaaggttttgcaacttggatgtcttggtactcttgtaacgagtttcagccacaatggaacgtctggcaacagtacgttgccgatagtttgcaacgtgctttatcacttgattctttgagatcatctcatccaattgaagtacctgtgaagaacgcggatgaaatcaatcaaatctttgatgcaatttcgtactccaagggttcttctctgctaagaatgatttcaaaatggttgggtgaagatattttcattaagggtgttgctgaatatttgaataagttcaagtatggtaatgctaaaactgaagatttatgggactctctttcagaagcttccgggaaggatgtcaccaaggttatgaatatttggacaaaacagattggatacccaattgttactgttaatgaagaaggcgaaaagatcagcttcacgcaacacagatttttgtccactggcgatgtcaagcctgaagaggatgaaactctatatcctgtattcttggcaattaagaccaaggatggcattgacaataacattaatctagatgagagagagaagactattgaactaaaggacaatgaattttttaagattaatggtaatcaagctggtgtttatgtaacatgctacagtgatgaaagatgggcaaaattaagtaagcaagccgaatttttgtcagtcgaggatagaacaggtcttgttgctgacgttaagtctttggcctcctcgggctacacttctacaacaaactttttgaacttgatttccaattggagcaatgaagaatcctttgtagtttggacacaaatgataaatagtatttctgctcttgagtctgcttgggtttttgaagatgaatctatcaagactggattgaagaactacgtgaccaaattgtccatagagaaggctcataaattaggttgggaattctccaacgaagactcatattccacacaaaaactaaaagtcttactgtttgatgttgcatgtagtaatgatgatgaaaaagctcaatctgcagccattgacatgtttaataaatatatctctggtgataagaaggccattcctgcattgatcaaaccatccgtctttaatactgttgcaagcaaaggtggtgaagaaagctaccagaaactatacaatatctataagaacccaatggcgactgatgaaaaactggctgctttgagagcccttggtaaattcaaagaagataaattgattaccaaaacactatcgtatctattagatggaacagtcttgagtcaagatttctatattccaatgcaaggtttgagaactcacaaggaaggtatattggccatgtgggagtttttaaaacaaaactggactgaaattattaagaaactacagccaggttcccctgttcttggtggtgtcttaactgtatcagtatcatctcttgcatctgtggaaaagatagatgacgtgaaacaatttttcagtgacaaaccaacaaagggttttgatcaaaccctagctcaagcgttagacactgctactagtaaatcaaaatgggttgcaagagatggtgaggttgttagaaagtatctggaagataatggctactttatcaactag

SEQ ID NO: 855 - protein, 857 aa, Candida glabrata CBS 138
MDREILPSNVTPLHYDLVLEPSFETFKFDGSVTIDLQVNDSTVDSISLNTLEIDIKAVTLDGSITPSEIKVDEAAQVTEFVFEKGTLSEKKSVKLEIKFIGILNDQMAGFYRAKYEDKQTGETKYMATTQMEATDARRAFPCFDEPNLKSTFDVTLISDKHLTQLSNMDVKSETIEGEKKITKFNTTPKMSTYLIAFIVAELKYVESKEFRIPVRIYSTPGDEHLGEFAASLTARTLKFFESTFDIEYPLPKMDMVAVHEFSAGAMENWGLVTYRVVDLLLDKENSTLDRIQRVAEVIQHELAHQWFGNLVTMDWWEGLWLNEGFATWMSWYSCNEFQPQWNVWQQYVADSLQRALSLDSLRSSHPIEVPVKNADEINQIFDAISYSKGSSLLRMISKWLGEDIFIKGVAEYLNKFKYGNAKTEDLWDSLSEASGKDVTKVMNIWTKQIGYPIVTVNEEGEKISFTQHRFLSTGDVKPEEDETLYPVFLAIKTKDGIDNNINLDEREKTIELKDNEFFKINGNQAGVYVTCYSDERWAKLSKQAEFLSVEDRTGLVADVKSLASSGYTSTTNFLNLISNWSNEESFVVWTQMINSISALESAWVFEDESIKTGLKNYVTKLSIEKAHKLGWEFSNEDSYSTQKLKVLLFDVACSNDDEKAQSAAIDMFNKYISGDKKAIPALIKPSVFNTVASKGGEESYQKLYNIYKNPMATDEKLAALRALGKFKEDKLITKTLSYLLDGTVLSQDFYIPMQGLRTHKEGILAMWEFLKQNWTEIIKKLQPGSPVLGGVLTVSVSSLASVEKIDDVKQFFSDKPTKGFDQTLAQALDTATSKSKWVARDGEVVRKYLEDNGYFIN

SEQ ID NO: 856 - DNA, 2763 bp, Kluyveromyces lactis NRRL Y-1140
  CDS (1)..(2763)
atgttcggacacgtaccaaagatactgaacggtatacgaggcgcgtgggctaggccaatggctgcctccaggtctctgttcactcatacaaagttccattgtaacaaatgtgaacgtacaaaaaaccatctgttatcttccccttttcagacagaggaaagcacagtaacatacaaacacaatatgtctagtcaacctgatcgtattatattgcctcaaaatgtgagtccattgcactacaaattgcaattggagccatatttcgatacattcaagtttgatggtacggtaagcattgatttgaaagttaacgacaaggaaagtgattttgttgagttgaacacttttgaattggatattcacgaagctaagattaacgatgttaaatcactagaaactgtcactgatgaagagaatcagaccagtaggttcaagtttccagctgggactttgaaggactctgataatgtgacaattgatatcaaattcactggtatcttaaacgatactatggctgggttttaccgtgccaaatatatcgacaacgctacaggtgagacgaaatacatggctactacacaaatggaacctactgatgctcgtagagcgttcccatgttttgatgaacctaatttgaaggcttctttcgaaattactttggtttcggatccaaagttgacccatttgtccaatatggacgtgaaaaaagaagagatttttgatggtaagaaattcacatatttcaatccaactccaaagatgtccacttatttggttgctttcatcgttgctgaattagaatacgtggaatgcaaagatttcagaattccagtcagagtttacgccactccaggatctgaacatctgggccagtatgctgctaatttgaccgccaagactttatcattctttgaaaaagctttcggtattgagtacccattgccaaagatggactctgttgctgtccatgaattctctgcaggtgctatggaaaattgggggttggtcacttatcgtgtcgttgatcttttgttggatgagaagaatgccagtttggaacgtatcaagcgtgtcgccgaagttgttcaacacgaattggctcatcaatggttcggtaacttggttactatggattggtgggaaggtttgtggttaaacgaaggtttcgccacctggatgtcatggtacgcctgtaaccagttccaacctgaatggaaagtatgggaacaatacgttgcagacgatttgcaaagtgccttagggttggactctttgagatcctcccacccaattgaagttcctgttaagagagcggatgaaattaaccaaattttcgatcatatctcttacgcaaagggttcttctttgttaagaatgatttctcagtggttaggtgaagatgttttcgtcaagggtgtttctcagtacctaaataaatttaagtttggcaatgctaaaacagaagatttatgggacgctttatctgaagcatctggtaaggacgttcgtaacgttatggatatctggaccaaaaaagttggtttcccaatcgtttctgttactgaagatggtcacaaaatcactttcaagcaaaaccgttacttgaatacagctgatgtcaagcctgaagaagataaaactttgtatccagtgtttttgtctttaaagacaaattctggtgttgatcattcgttaactttggacgaaagagaattaactgttactgttgaggatgttgactttatcaaaactaacgcaaaccaagcaggtatctacgtcacttcatactctgatgatagatggactactttatccaaacaatctgatttgttgactgttgaagaccgaactggtttagttgctgattgtaagacgttgtccttgtcaggttatacttccaccaaaaatttcttacaattgatttctcaatggaaaaacgaggactcctttgttgtctgggagcagatgataaacagtttgggatctttgaaggctgcttgggcctttgagccaaaggaaactttggaagccttggatgaatttactagacaattggtctcagagaagacccactctttgggctgggaattctcagagaacgagtcttacgcgtctcaaaggttgaaggttgaaatgttctcatcctccgctgcagcaaaggatccagttgtcgttaaggccgctttgaaaatgtttgagaaatacacttctggcgacagcaacgctattccaccattgattaaatcatccgtattcggtactgttgccagagacggtaatgccaaaaattacgaaaagttatttgctatttacaaaaatccttcctcgtctgacgaaaagctttctgctttaagatgcttaggtagatttgaagacccggctttgatgaaaagaactcttggttatctgtttgacggaaccgtgttgaaccaggatatttatattcctatgggcggtatgagaggtcataaggaaggtatcaaaaccctctgggcttggaccaaagaaaactgggacgctcttcacaaaaaatttccaccctctttgactatgttgggctcaatcttgactgtcgctacatctgggtttacttctcgtcaagcaattgatgaaattgaagactttttcaaggataagtccaccaagggtttcgaccaaagtttggcacaaactttagatactataacatctaaggctaactgggttgatagagaccgcgaagtggttgttaaattcttgaaggaacataactattacaaatag

SEQ ID NO: 857 - protein, 920 aa, Kluyveromyces lactis NRRL Y-1140
MFGHVPKILNGIRGAWARPMAASRSLFTHTKFHCNKCERTKNHLLSSPFQTEESTVTYKHNMSSQPDRIILPQNVSPLHYKLQLEPYFDTFKFDGTVSIDLKVNDKESDFVELNTFELDIHEAKINDVKSLETVTDEENQTSRFKFPAGTLKDSDNVTIDIKFTGILNDTMAGFYRAKYIDNATGETKYMATTQMEPTDARRAFPCFDEPNLKASFEITLVSDPKLTHLSNMDVKKEEIFDGKKFTYFNPTPKMSTYLVAFIVAELEYVECKDFRIPVRVYATPGSEHLGQYAANLTAKTLSFFEKAFGIEYPLPKMDSVAVHEFSAGAMENWGLVTYRVVDLLLDEKNASLERIKRVAEVVQHELAHQWFGNLVTMDWWEGLWLNEGFATWMSWYACNQFQPEWKVWEQYVADDLQSALGLDSLRSSHPIEVPVKRADEINQIFDHISYAKGSSLLRMISQWLGEDVFVKGVSQYLNKFKFGNAKTEDLWDALSEASGKDVRNVMDIWTKKVGFPIVSVTEDGHKITFKQNRYLNTADVKPEEDKTLYPVFLSLKTNSGVDHSLTLDERELTVTVEDVDFIKTNANQAGIYVTSYSDDRWTTLSKQSDLLTVEDRTGLVADCKTLSLSGYTSTKNFLQLISQWKNEDSFVVWEQMINSLGSLKAAWAFEPKETLEALDEFTRQLVSEKTHSLGWEFSENESYASQRLKVEMFSSSAAAKDPVVVKAALKMFEKYTSGDSNAIPPLIKSSVFGTVARDGNAKNYEKLFAIYKNPSSSDEKLSALRCLGRFEDPALMKRTLGYLFDGTVLNQDIYIPMGGMRGHKEGIKTLWAWTKENWDALHKKFPPSLTMLGSILTVATSGFTSRQAIDEIEDFFKDKSTKGFDQSLAQTLDTITSKANWVDRDREVVVKFLKEHNYYK

SEQ ID NO: 858 - DNA, 2634 bp, Kluyveromyces lactis NRRL Y-1140
  CDS (1)..(2634)
atggctgacgttaagattcaaactctaccaaccgactttagggccaaccattatgagattgaattgagtgagttagatgctgagcacaattcatttatcggatccgtgcgtattattatgtccactgttaatgccaatgacatgatttcattgaatatgagggacattgagatcgtttctgcggtggttgaactgaaagaggggtctgtgtctttgggaatgaaggaccatagtttcgatttagagaacgatgttgtttccttgaaatttccggagagtatatctgatgatgaattcgtgttgaagatcgattataagggtatgattcagactaatatgtctggattctaccgttcagattatactgattttgttaccggtgaaaataaggtaatgttttccactcagttcgaggcaacggatgctcgcagagcattcccatgtttcgatgaaccctctttgaaggcaacctttgacatatgcattatcgcgcatgagaaatacactgtgttagctaatatgcctctgaagtgcacgaagaaattgacagaatcagaccaaatttcttatagattccatactacaccattaatgtctacttatctagtggcatgggccgtgggagaatacgactacattgaatctgagaccgaaaagagtatatatcctaccattgagaactacaatacacaggatggcacttcttctggttgtggtaagctaccggtgaaagtgtacacagccaagggaaaagctcaacaggggaaatttgcacttgatgtagccaagagagtcattgatttcttctctgaatcttttgaaattccatacccattgccaaaattagatttgctatgtgtcgagacttattctcataatgccatggaaaacttttcgttgatcacctttagaccgtctgcgttgttgtacgacggtaacttagatgaacctgatgctgctgctttacaaaagatcgcatatgttgtatcgcatgaaattgcccatcaatggtttggaaatcttgtaacgatgaagtggtgggatgaattatggttaaatgaaggttttgctacctggatcggatacttggctgttgaaaaattcttcccagattgggatgtcccatccatgatcatgttgcaatcgcatgaagtagctcttgaattggactccttgaaagaatcacatcctataaaagtagcggttcgtaacgctaaagatatagatcaggtattcgattccatctcgtatttgaagggttgttctattctcgaaatggtaagcggttatttaggacaagaactctttttgaaaggtgttgctttatacttgaagagaaacaagttctcaaacgcaacaatggaagatttgttcaactgtattggtgaagtcgctgatatagaagtactggaacgttgtaagaactggattttgactattggatacccattggtcactgtgacagagtctgaaattggtttgagtttgacccaaaacaggttcttatccactggtacttgcaaacctgatgaagatgttacaaagtggtgggtgcctttgatgccactccagggtgattacaaggtggacttttcaggaaagaccacagagttaccaaagacacaattcaaccatttcaatgccaattcatttggcttttaccgagtcaagtacgattctgatcatttgtttcaacaacaattacaaaatttggataaactttcatcaagaggcaagatgggcctaatctctgatgttgaagtaacagaatgtgtcaaaaatcttctaaccttgatatcaaagtttaccaatcatcaggatcctaacgactactatgtatggtcaattatcttcgatacgttaaacaggatgaaatcacttttatcctctgataaagcagtgaaaaaggcgttggataatttcactctggatttaattcaaccatccatcgaaaagctattggaatttctagaccagcagaaaacaaattctttcagtaaaaatcccgataatttcctaagcaaccagttctttgaattgatggctcttggtgctggtactgcctctcatcctgaaactgttgccaaatgtagagaaatgtttgaatcgaaatcttattctccggtctttagaaacgttttattgcaaataattttgtcccagccggacacaacaaaggaaacactaaagactatcctagaggaattgaatacatcaacattagtttacaaggaaagtttgttgacggccttgggtaagattaaaaatgcggaattattcgataccgtcctaaatctactattaattattgaacctatggacgttcagttcctagcgacctccctcgggtccaattacgctatccggacgaaactctggaactttatcaaaaccaattacgtcaaattgcatgagagattagcgattaacacagttgttatcgataggtttttgagattttcaatgaaagatttgatgggcgaagatgtcaagacagattatgaactgttcttcgctgataagaacatggaaggtttcgacagaggtgttagacaaacgttggaaagaattgagaaaaacaccaggtacttcgaaacaaacttatccttggtcaaagagtactttaaaatatga

SEQ ID NO: 859 - protein, 877 aa, Kluyveromyces lactis NRRL Y-1140
MADVKIQTLPTDFRANHYEIELSELDAEHNSFIGSVRIIMSTVNANDMISLNMRDIEIVSAVVELKEGSVSLGMKDHSFDLENDVVSLKFPESISDDEFVLKIDYKGMIQTNMSGFYRSDYTDFVTGENKVMFSTQFEATDARRAFPCFDEPSLKATFDICIIAHEKYTVLANMPLKCTKKLTESDQISYRFHTTPLMSTYLVAWAVGEYDYIESETEKSIYPTIENYNTQDGTSSGCGKLPVKVYTAKGKAQQGKFALDVAKRVIDFFSESFEIPYPLPKLDLLCVETYSHNAMENFSLITFRPSALLYDGNLDEPDAAALQKIAYVVSHEIAHQWFGNLVTMKWWDELWLNEGFATWIGYLAVEKFFPDWDVPSMIMLQSHEVALELDSLKESHPIKVAVRNAKDIDQVFDSISYLKGCSILEMVSGYLGQELFLKGVALYLKRNKFSNATMEDLFNCIGEVADIEVLERCKNWILTIGYPLVTVTESEIGLSLTQNRFLSTGTCKPDEDVTKWWVPLMPLQGDYKVDFSGKTTELPKTQFNHFNANSFGFYRVKYDSDHLFQQQLQNLDKLSSRGKMGLISDVEVTECVKNLLTLISKFTNHQDPNDYYVWSIIFDTLNRMKSLLSSDKAVKKALDNFTLDLIQPSIEKLLEFLDQQKTNSFSKNPDNFLSNQFFELMALGAGTASHPETVAKCREMFESKSYSPVFRNVLLQIILSQPDTTKETLKTILEELNTSTLVYKESLLTALGKIKNAELFDTVLNLLLIIEPMDVQFLATSLGSNYAIRTKLWNFIKTNYVKLHERLAINTVVIDRFLRFSMKDLMGEDVKTDYELFFADKNMEGFDRGVRQTLERIEKNTRYFETNLSLVKEYFKI

SEQ ID NO: 860 - DNA, 2712 bp, Debaryomyces hansenii CBS767
  CDS (1)..(2712)
atgtgtaattctaataaaaaaccttattatgaagcgttgcctgcttctttaaagccttatcattatgatttatccatcagtgatatcaatgttgagaaggagacatttaaaggaaaagtggtaatttacttcacaattgtggaagaaacaaaggaattgcatttaaactatagagatttgtcagtgtcacaagataaaattaatatagttttgcaatgcaatgattctactaaggatattggtgttacttcaattgaagaatttaaagagaaagagtattttataatcaagtttgatgaaaccgtaaagcctatgaataattccaagttgattgtcacattgaattttgatgctataattcagactaatatggctggtttttacaaatctggttataaagaaagtggcgttgaaaagattatgttgtctactcaatttgaagctactgatgccagaagagctttcccatgtcttgatgagcctgcattgaaagctacgtttagtgttgatttaatagtttcacaggaatggacaactttaggaaatatgccgatatttgaagaaaaatcaattggatcgaacttgaaaacggtgaagtttgagaaaacaccaataatgtctacttacttgttggcatgggcttgcggtgaattcgagtatattgaatcatttacggatggtgtttatcaaaacgataagccattgcctgttcgtatttatactacgaaaggttataaggaagaagctaagcttgcctcagagatagctcctaagatcatagattacttctcgaaaatcttcgaaatcaaatatcctttaccaaaactcgacttaattgctgttcattcgttttctcataatgccatggaaaactggggtctagttacttaccgtagtaccgcattattatattctgaaactaaatctgatccatcatataagcaaaaggttgcctacgttgttgctcacgagttagcccatcaatggttcggtaatttggttacgatgaaatggtgggatgaattatggcttaatgaaggttttgccacttgggtaggttttgctgctgtcgattatttattccctgagtgggatatatttagcggatttgtttctgaatccttacaacaagctctcaatttagatggtttaagaaattcacacccaattgaagtccctgttgtggatgctttagacattgatcaagtctttgatgcgatttcttatttaaaaggtgcttcaactatattaatgatttcaaactctcttggaactgaaatatttttgaagggtgtcgcaaactacttaaataagaacaagttcagtaatgctacttcccatgacttatggtcttcgatcagtgaagtttctggtagaccagttaacgagatgatggaatcatggatcaagaaaattgggttccctattgttaatgtagatttgaattccgctgctaaacaattgactatcaagcaatcaagatttttgaatagtggagatttagaagatgaagaaaaccataccaaatggtggattcctttaaatatttccaatggaccctctattggcgataagttatcgttagatccaaacgaaatttctcctggttctgctaacgttacaataaatgatttcccattgactaatgatttcttcaaattgaataaagatacagcgggtgtttatcgtgtgaattattcgccacaggtaatggaacacaatattttaccatttttcaataaattatctggtaaggataaggtgggtattattgcggatgtggcatctatcgctgtctctggtgacagatttacttccacaaccacattattaagattaattaagtcagtgatagattctgattccattggtgatgaatacgttgtttggttagagttaggtaaaagattggatcatattttagtttccttcgctggtatggatgagcgtgtatcgataggcttaaaaaactttgcaaaatcagtttatgaaaaagtgtctgtcaactttttaaatgaattagaaaagaataaaatagacgattctcaattcttgaggaccaaattaagagcagaaatattgggtaagtctggattgctttcaattactgaaagtgaagattatgctttgaggttatttaacgaatggaaatcaggaaagcctattcatccatcattgagagcttttgtcttctcgactattgtctcttctaaacggttaattgatagcgaaaagtttggattaatcttacacgaagtaacacaccccacttctttggattcgcgagaaatagcgctagagtcattaggtcatattaatgataaagaattatcccagaaattaataggatatttaataaatccggatgtcgttccaaccatggattcacacttcttaggacgttcgttatcaacaaatgccactacaaaagatgaattttggaagtttttcaaagaaaattatgatgaattttataaattaatgtcaacgaatatggttgtcttagatcgattcatcaaacttactttgggtaaatatcaatctatggcaatgtataacgagataaagaattttttcagccggaaggatgtccacggttttgaaagatcatataaacaggttttagacaatattcttatcaattcctcatgggttgaaagagacttagatgaagtcaaggaatggttgcaagcaaatggttatataaattag

SEQ ID NO: 861 - protein, 903 aa, Debaryomyces hansenii CBS767
MCNSNKKPYYEALPASLKPYHYDLSISDINVEKETFKGKVVIYFTIVEETKELHLNYRDLSVSQDKINIVLQCNDSTKDIGVTSIEEFKEKEYFIIKFDETVKPMNNSKLIVTLNFDAIIQTNMAGFYKSGYKESGVEKIMLSTQFEATDARRAFPCLDEPALKATFSVDLIVSQEWTTLGNMPIFEEKSIGSNLKTVKFEKTPIMSTYLLAWACGEFEYIESFTDGVYQNDKPLPVRIYTTKGYKEEAKLASEIAPKIIDYFSKIFEIKYPLPKLDLIAVHSFSHNAMENWGLVTYRSTALLYSETKSDPSYKQKVAYVVAHELAHQWFGNLVTMKWWDELWLNEGFATWVGFAAVDYLFPEWDIFSGFVSESLQQALNLDGLRNSHPIEVPVVDALDIDQVFDAISYLKGASTILMISNSLGTEIFLKGVANYLNKNKFSNATSHDLWSSISEVSGRPVNEMMESWIKKIGFPIVNVDLNSAAKQLTIKQSRFLNSGDLEDEENHTKWWIPLNISNGPSIGDKLSLDPNEISPGSANVTINDFPLTNDFFKLNKDTAGVYRVNYSPQVMEHNILPFFNKLSGKDKVGIIADVASIAVSGDRFTSTTTLLRLIKSVIDSDSIGDEYVVWLELGKRLDHILVSFAGMDERVSIGLKNFAKSVYEKVSVNFLNELEKNKIDDSQFLRTKLRAEILGKSGLLSITESEDYALRLFNEWKSGKPIHPSLRAFVFSTIVSSKRLIDSEKFGLILHEVTHPTSLDSREIALESLGHINDKELSQKLIGYLINPDVVPTMDSHFLGRSLSTNATTKDEFWKFFKENYDEFYKLMSTNMVVLDRFIKLTLGKYQSMAMYNEIKNFFSRKDVHGFERSYKQVLDNILINSSWVERDLDEVKEWLQANGYIN

SEQ ID NO: 862 - DNA, 2709 bp, Yarrowia lipolytica CLIB122
  CDS (1)..(2709)
atggctagagatactctcccttccagcctcaagcccaccaactacaacctcagcgtctacgatattgacatcgaccagttcctgttcaagggacgagtcgtcatcaagttcgacgtcaatgaggctaccaagtccatcgacctcaacgccaaggacctcaagctcgacagcgtggaggtcaaggccgacgtcaccaagaccgaggtcgcaatcaacgtggattccattgactataacgagaagaatgacaccgttgccattgctctcaagtccgagatccccgccaacgccacttctgttactgctaccatcctgtattccggcgtcattcagcagaacatgtccggtttctacaagtcctcctacaaggatcccgagggcaacgacaagattcagctgtccacacagttcgaggccactgatgcccgagccgccttcccttgcatggatgagcccaacctcaaggcaaccttcgatgtctccatcactgtacctgaagcctgggaggttatctccaacatgcctgtggtcgcctctaaggcccccaccgacggaaagaagggtgccaccaagggcccctccaagggcccctccaagggtccctccaagggtcccgctgatggagccgacgctgcgaccaagaccgtcaccttcgacaccacccccaagatgtccacctacctgctggcctgggcctgtggtgaatttgagtacgtggaggactttaccgagcgatcatacaacggccgaaagctgcctgtccgagtctacaccaccaagggtcttaaggagcagggcctgtttgctctagacgtgaccaagaaagtcattgatctcttctccgacgtgtttgagatcgactacatgctgcccaagatggacctgctggcatgccatgagttctctcacggcgcaatggagaactggggtctcattacctaccgaaccactgccgttctgtttgacgagaagacttctgctgccgcctacaagcagcgtgttgcctacgttgttgcccacgaggttgcccatcagtggtttggcgatctcgttacaatggactggtgggacgagctgtggctcaacgaaggtttcgccacctgggttggatggtacgctgttgaccgactcttccccgactggcacgtcttcactgccttcgtggctgagaacatggaggacgctttgcagctggactctgtgcgagcctctcaccctattgaggttcctgtgacctctgccaaggatattgaccagatcttcgatgccatctcttaccttaagggagcttccaccattcgaatgcttggcaacactcttggtgttgacaccttcctcaagggtgttgctgcttatctgaagaagcattcctacggtaacgctcataccgccgatctgtggtccgcgatttcggaggtctctggccgagacgtcaactccctgatggagtcatggatcaagaagattggttaccctgtcatcaccgtcaccgagaatgagggctccactgccactctcaagcagaaccggttcctcactaccggcgatgctaagcctgatgaggatgaaactctttggtgggtccctcttgaggtttcctctgcaggccctggcgaagaggccaccggtaactccgactctttcgatgtccgtgagacttccatctctggtgttgcccacaacggcttcttcaagctgaaccgaaaccgaactggtttctaccgatgcaactactctgttgctcgattggagtctttcggccagcatctcgacaagctgtcttctgaggaccgagttggtatcatctctgacgctctggccacctccattgctggctacgcttccactgttggccttctgtccttcatctctcagctttccggtgaagacgaccctgtggtgtggacatccattcttgacgccatggcgacaatccgatcggcttggttcgagcagtctgaggagacccaaaaggctattgacgcctttactgccaagctgatcgagcccatcacctctaagattggtcttgagttcactaacaaggacaacttccttgactcccagctgcgaacccgactcctgggcactgctgctggtcttggtgttgatgctgtctcttctcacctcacctccctgttcgacaagtgggcagccggagacaagactgccatccatccctccattcgaatccccgtcttccgagccgcagtttcgcagtctgacgactccaagtctgcagctgcctttgatgcactactcaaggagctcgaggacccctcttctgtcgactctattgagattgttctctcttctcttggtgccgttcagtctcctgctctgatcaagaagtctgtcgatatgcttctgactattgctcccatgaacctacatttcctcggtggctctcttgtcaacaacaagaaggctcgatgggcccagtgggagttcatcaaggccaactgggaccatggagttgtttccaagcttggagccaacatggttgttcttgaaagatacctcaagctgtcccttcgacagtttgcttctcagaaggctcttgacgacgtggaagagttctttgtcggcaaggacctcgacggtttcgaccgatctcttggccaggccaaggactttatcaagtctcgagctgcctgggttcagcgagatggctctgttgttggcgagtggcttgccaagcagcagtaa

SEQ ID NO: 863 - protein, 902 aa, Yarrowia lipolytica CLIB122
MARDTLPSSLKPTNYNLSVYDIDIDQFLFKGRVVIKFDVNEATKSIDLNAKDLKLDSVEVKADVTKTEVAINVDSIDYNEKNDTVAIALKSEIPANATSVTATILYSGVIQQNMSGFYKSSYKDPEGNDKIQLSTQFEATDARAAFPCMDEPNLKATFDVSITVPEAWEVISNMPVVASKAPTDGKKGATKGPSKGPSKGPSKGPADGADAATKTVTFDTTPKMSTYLLAWACGEFEYVEDFTERSYNGRKLPVRVYTTKGLKEQGLFALDVTKKVIDLFSDVFEIDYMLPKMDLLACHEFSHGAMENWGLITYRTTAVLFDEKTSAAAYKQRVAYVVAHEVAHQWFGDLVTMDWWDELWLNEGFATWVGWYAVDRLFPDWHVFTAFVAENMEDALQLDSVRASHPIEVPVTSAKDIDQIFDAISYLKGASTIRMLGNTLGVDTFLKGVAAYLKKHSYGNAHTADLWSAISEVSGRDVNSLMESWIKKIGYPVITVTENEGSTATLKQNRFLTTGDAKPDEDETLWWVPLEVSSAGPGEEATGNSDSFDVRETSISGVAHNGFFKLNRNRTGFYRCNYSVARLESFGQHLDKLSSEDRVGIISDALATSIAGYASTVGLLSFISQLSGEDDPVVWTSILDAMATIRSAWFEQSEETQKAIDAFTAKLIEPITSKIGLEFTNKDNFLDSQLRTRLLGTAAGLGVDAVSSHLTSLFDKWAAGDKTAIHPSIRIPVFRAAVSQSDDSKSAAAFDALLKELEDPSSVDSIEIVLSSLGAVQSPALIKKSVDMLLTIAPMNLHFLGGSLVNNKKARWAQWEFIKANWDHGVVSKLGANMVVLERYLKLSLRQFASQKALDDVEEFFVGKDLDGFDRSLGQAKDFIKSRAAWVQRDGSVVGEWLAKQQ

SEQ ID NO: 864 - DNA, 2652 bp, Aspergillus nidulans FGSC A4
  CDS (1)..(2652)
atgtgtggtactcgacgcgctgaggcggccggttcgactaatgttcctggccgtgaggttctgcctaccaacgtcaagcccactcactatgacttgacccttgaaccaaactttgagacattcaaatatgacggaaccgtaattattgacctacaggtcgccgaagacacaacgtccatttctctcaactccactgaaatcgacattcacacagctactgtttccgcccaaggatcagtagtcagctcttcgcctgagatcttgcttaataaggacaagcaagaggccaccataaagttctctgaaaccatctctgccggttcgtcagctcagctcaagctgaccttcaccggcacgctcaatgacaatatggccggtttctaccgctcgtcttacaagacaccgcaaggagagacaaagtacatcgcctcgacgcagatggaaccgaccgatgcccgccgagctttcccttgcttcgacgagcccgcgctcaaggccaagtttactgttagtctgattgcggataagagcatgacctgcctcggtaacatggatgttgcttcagagcaggagcttgagggtggaaaaaagattgtcaagtttaacacatccccggttatgtcaacatatctggtggctttcattgttggccatctcaactacattgagactaagaacttccgcgtccccatccgggtatatgctacaccggaccaggacattgaacacggtcggttctctctagaacttgcggcgaagacactggcgttctacgaaaaggccttcgatagcgagttcccgctcccgaagatggatatggttgcggtgcccgattttagtgccggagccatggagaactggggcttgatcacgtaccgtattgtggatgtgcttttggatgagaagaccagcagtgcctcgcggaaggagcgcattgctgagaccgttcagcacgagcttgcccaccagtggtttggaaacctggttaccatggatttctgggacggcctctggctcaacgaaggttttgccacctggatgtcctggtattcttgcaacagcttctatcccgaatggaaggtctggcagacgtacgttatcgacaacctgcaaagtgctctttctcttgattcgcttcgcagcagtcaccccattgaagtacctgtgaaacgtgcggatgaaatcaatcagatttttgatgccatctcttactccaagggatcctccgtcctgcgcatgatttccaagtatctgggtgaagatatcttcctccagggcgttcgtaactacatcaagaagcatgcttatggcaatacacaaactggcgatctttggtccgctcttgccaatgccagtggcaagcctgttgaagaagttatggatatctggacaaagaatgttggattccctgtagtcaccgtctcggagaaccctacctcttcgtccatcaaggtcaagcagaatcgattccttcgcacaggcgacgtccgtcctgaggaggataccaccatcttcccagtcatgcttggcttgcgcacgaagcagggtgtcgacgaggacactctactgtctgagcgggagggcgagttcaagcttccagaccttgatttctacaagctcaacgctgaccattccgctatctaccgcacgtcgtacaccccagagcgtcttaccaagctcggtgaggctgccaaggcgggcttgcttaccgttgaggatcgcgcaggtatgatcgctgacgccggtgccttggctgcctcgggataccagagcacttccggactcctctcactgctggctggattcgacagcgaacctgagttcgttgtctggaatgagattttgacccgtgtaggtgctcttcgcgctgcttgggttttcgaagatgcccagaccaaagacgcattggaggggttccagcgcgctctggtcagcgacaaggcgcacacactgggctggcagttttctgagaacgacggccacatcatccaacagttcaaggctctgctgttcagcgccgccggaaatgccggagacaaaactgtggtccaggccgcccaggacatgttccagcgcttcgctgctggtgatattagcgccattcacccgaacattcgcggtagcgtcttctccattgttctgaagaacggcggtaagaaggaatacgatgtcgtgtatgatcgcttccgcaacgcccccacctctgatgaaaagactaccgctctccgctgccttggcgccgccgaagaccctgagctcatccaacgcactcttggcctggctcttggtgatgaggtcaagaaccaggacatttacatgccacttggtggccttcgcaatcacgccgccggtatcgacgcacgttgggcttggatgaaggacaactgggacaccctctaccaacgcctaccccccggactaggcatgctcggaactgttgttcagatttgcactgctagcttctgtacggaagagcaactcaagggtgtgcaaaacttcttcgcaaacaaggataccaagggctacgatcgtgctattgagcaaagtctcgacgcaattcgcgccaagatcagctgggtccagcgcgaccgtgctgatgttggatcatggttgaagtcgaagggataccttccgggtaatggcaaactataa

SEQ ID NO: 865 - protein, 883 aa, Aspergillus nidulans FGSC A4
MCGTRRAEAAGSTNVPGREVLPTNVKPTHYDLTLEPNFETFKYDGTVIIDLQVAEDTTSISLNSTEIDIHTATVSAQGSVVSSSPEILLNKDKQEATIKFSETISAGSSAQLKLTFTGTLNDNMAGFYRSSYKTPQGETKYIASTQMEPTDARRAFPCFDEPALKAKFTVSLIADKSMTCLGNMDVASEQELEGGKKIVKFNTSPVMSTYLVAFIVGHLNYIETKNFRVPIRVYATPDQDIEHGRFSLELAAKTLAFYEKAFDSEFPLPKMDMVAVPDFSAGAMENWGLITYRIVDVLLDEKTSSASRKERIAETVQHELAHQWFGNLVTMDFWDGLWLNEGFATWMSWYSCNSFYPEWKVWQTYVIDNLQSALSLDSLRSSHPIEVPVKRADEINQIFDAISYSKGSSVLRMISKYLGEDIFLQGVRNYIKKHAYGNTQTGDLWSALANASGKPVEEVMDIWTKNVGFPVVTVSENPTSSSIKVKQNRFLRTGDVRPEEDTTIFPVMLGLRTKQGVDEDTLLSEREGEFKLPDLDFYKLNADHSAIYRTSYTPERLTKLGEAAKAGLLTVEDRAGMIADAGALAASGYQSTSGLLSLLAGFDSEPEFVVWNEILTRVGALRAAWVFEDAQTKDALEGFQRALVSDKAHTLGWQFSENDGHIIQQFKALLFSAAGNAGDKTVVQAAQDMFQRFAAGDISAIHPNIRGSVFSIVLKNGGKKEYDVVYDRFRNAPTSDEKTTALRCLGAAEDPELIQRTLGLALGDEVKNQDIYMPLGGLRNHAAGIDARWAWMKDNWDTLYQRLPPGLGMLGTVVQICTASFCTEEQLKGVQNFFANKDTKGYDRAIEQSLDAIRAKISWVQRDRADVGSWLKSKGYLPGNGKL

SEQ ID NO: 866 - DNA, 2640 bp, Aspergillus nidulans FGSC A4
  CDS (1)..(2640)
atggcatcaaaggacagagatattcttcccaatgtggtcaaacctgcccattatgacatttccctcttcgacctgcagctcggtggctcgtggagctacaagggtatagtcaacatcacttcaaaggtctacagtcccacaagggaagtggtgctcaatgcaaaagaaattgaagtgcaccatgcgaaggttctaggattagacgagttgaccaaaacgtctgagatcacctacgatcagaaatcggaaagggtgacaattaggttccccaaggaactccctcagtccgaactcgtcgtctccatatcgttcaccggcaccatgaataatgccatggctgggttttaccgctccaaatataagcctgctgtcgagccgacgtctgacacccccaaggaaggagaattttattatatgctgagcactcagtttgagtcctgtgatgcacgcagagcatttccttgttttgatgagccaaacctcaaggcgacatttgacttcgaaattgaagtgcctaagggtcagacggctatcagcaacatgccagtcaagtccgaaagggagggcagcaagcctgagctcaaagtggtttctttcgatacgaccccagtgatgagcacttatcttttggcgtgggcaattggtgactttgactacgtcgaggcattgaccgaacgtaaataccagggaaagagtattcctgttcgtgtctatacgacgaagggacttaaagaacaagcccgctttgctcttgaatgtgcacatcggaccgtcgactacttctcggagattttcgagatcgaatatcctctgcctaaggcagatcttctagcggtacatgaatttgcaatgggagctatggaaaactggggtcttgtgacgtatcgcacgactgccgttctgttcgacgaaggcaaatcagatactcgttataagaatcgaattgcttatgttgtcgctcatgaacttgcacaccagtggtttggcaatctcgtaacaatggattggtgggatgagctctggctcaatgagggctttgctacatgggtcggatggcttgctgtcgatcacttctatccagaatggaatatctggtcgcagttcgtggctgaaggtgtccagcaagcatttcaactcgattcgttgcgtgcatctcacccgatccaagtacccgtcaaaaacgctctagaggtcgaccagatctttgaccacatcagctaccttaagggtagctccgtcatccgcatgctcagtacccatcttgggcgcgaaactttccttcgtggtgtggcgcaatacctcaagactcacgcatatggcaacgctactactaatgatctttggattgcacttagccaagcatctaaccaggacgttaacagtttcatggatccatggattcgtaaaattgggtttccagttgtcacaatcgcggaagagacgggccaacttgaaattcgccaaaacagatttctctcaaccggtgatgtaaagcctgaagaggatgagacaacttggtggattccgctcggtatcaaatcgggtcccgaattgacggttcaggaccctcgtgctctcgtatcaaaggcggacaccatccagggcattggccaggattcgttttacaagatcaacaaagacctttccggtttttatcgaaccaactattcctcctcaagacttaaaaagctcggtcagtccctggattcgttaagcactgaggacaagattggattgattggtgacgctgctgccctcgctgtatctggtgaaagtagcactgcagccttgctatctcttctagaagggttcaaggatgaaacgaactatttggtttggtcccaaatttcgtcttctgtcggcaatttacggtctgtcttctcacagaacgaagaggtggctgagggcctcaagaagtttgctcgtgaactttcggcccccgccgcgaatatgatcggctgggagttcaagcccactgatgattatctcactctgcagttgcggaagcttctgatcgcgatgtcggggcttgcgggcaatgagagtattgtggctgaagctaagaatcgctttggtctgtgggcaaccgcaaaggacaagagcgctatccacacaaatctccgctctgcaatcttcagtattgctgtctcggaaggtactagagaagagtacgactctgtgaaggacgaatatctcaagaccgattctgttgatggcaaggaaatctgccttggggctctgggacgtacgaaggatgctgcacttgtcaatgagtatctggacttcgtgttctcggataaagttgctattcaggacgtgcataacggtgcagtttccttggcggccaactccaaagttcgtcatttgctatgggagtatatgaagaacaactgggactccgtagaagcacgtctttccgcaaacaacgtcgttttcgagcgtttcgtgcggatgggactctcgaaatttgctgatcatagcattggcgatgatattgctgcattcttccaggacaaggatacaactgcgtatgatcgcgcactagtgattgtggccgacagtatccggaccagtgccaactacaaagaaagggatgaaaagcaagtcttgaaatggctaaaagagcatggttatgcttga

SEQ ID NO: 867 - protein, 879 aa, Aspergillus nidulans FGSC A4
MASKDRDILPNVVKPAHYDISLFDLQLGGSWSYKGIVNITSKVYSPTREVVLNAKEIEVHHAKVLGLDELTKTSEITYDQKSERVTIRFPKELPQSELVVSISFTGTMNNAMAGFYRSKYKPAVEPTSDTPKEGEFYYMLSTQFESCDARRAFPCFDEPNLKATFDFEIEVPKGQTAISNMPVKSEREGSKPELKVVSFDTTPVMSTYLLAWAIGDFDYVEALTERKYQGKSIPVRVYTTKGLKEQARFALECAHRTVDYFSEIFEIEYPLPKADLLAVHEFAMGAMENWGLVTYRTTAVLFDEGKSDTRYKNRIAYVVAHELAHQWFGNLVTMDWWDELWLNEGFATWVGWLAVDHFYPEWNIWSQFVAEGVQQAFQLDSLRASHPIQVPVKNALEVDQIFDHISYLKGSSVIRMLSTHLGRETFLRGVAQYLKTHAYGNATTNDLWIALSQASNQDVNSFMDPWIRKIGFPVVTIAEETGQLEIRQNRFLSTGDVKPEEDETTWWIPLGIKSGPELTVQDPRALVSKADTIQGIGQDSFYKINKDLSGFYRTNYSSSRLKKLGQSLDSLSTEDKIGLIGDAAALAVSGESSTAALLSLLEGFKDETNYLVWSQISSSVGNLRSVFSQNEEVAEGLKKFARELSAPAANMIGWEFKPTDDYLTLQLRKLLIAMSGLAGNESIVAEAKNRFGLWATAKDKSAIHTNLRSAIFSIAVSEGTREEYDSVKDEYLKTDSVDGKEICLGALGRTKDAALVNEYLDFVFSDKVAIQDVHNGAVSLAANSKVRHLLWEYMKNNWDSVEARLSANNVVFERFVRMGLSKFADHSIGDDIAAFFQDKDTTAYDRALVIVADSIRTSANYKERDEKQVLKWLKEHGYA

SEQ ID NO: 868 - DNA, 2865 bp, Candida albicans SC5314
  CDS (1)..(2865): transl_table=12
atgttttctactgctcggaaaggcgttatttcaagtacgggtaagtatagacccaaactataccacggcatcactattttgaacattaacaaatcttttttttcgaaaattgcgctcacacacgacatggtaggcaaaaccccaaattccgtgaacaaaaatacaaatagacacattttccctttccataaaatatccaactcaggtttttcttcaggtggacaaaaactaagctattcaaaaatgtgccatcattccagatcttcagacaactctgcttctgttgtcaatcaagaaagagaagttttaccaacaaacgtcaagccattgcattatgatttaaccattgaaccaatctttgacaatttcactttcaaaggggaagaaaccattgactttcaagtcaacgagaaaaccaatttcatcaccttaaactctttggaaattgaagttcaagaagccaaaattgatggtaaatctgtcactgacatcagtttcgacgctggcaaacaaacagttactttcaaatttgatgatgacttaagtaccggctcaattgctaaattgtacattaaatttactggtgaattgaacgacaagatggctggtttttacagagcctcttaccaagaagatggcaagaccaaatacatggcaaccacccaaatggaacctaccgattgtcgtagagcatttccttcttatgatgaacctgcagcaaaatctaaattcaccatctcattgattgctgataaagaattggtttgcttatccaactcatcagaaaaggaaactgtttctcttgatggtaacaagaagaaggtcactttccaaaccactccattgatgtctacataccttgtagcatttattgttggtgacttgagatacatctcgaatgacaactacagagttccaattcgtgtttactcaactcctggaactgaacatttaggtgaatactctgctaacattgctgcccagactttgaaattcttcgatcaacaattcggtattgattacccatacgataaattggatatggttgccgtaccaagtttcagtgcaggtgcaatggaaaattgtgggcttgttacattcagaaccgtcgacttgttgattgatgctgataacgccaatgtgaacaccaagcaaagagtcacagaagttgtgatgcacgaattggcccatcaatggttcggtgacttggttactatggaattctgggatggtttgtggttgaatgaagggtttgcaacctggatgtcctggtacgcttgtaactccttgtacccagactggaaagtttgggaatcatatgtctccgattccttgcaacatgctttgacattggatgccttgagagcttctcacccaattgaggttcctgttaaaagagctgatgaaattaaccaaattttcgatgccatttcttactcaaaaggttcctcattgttaagaatgatttccaaatggttaggtgaagatgtgtttgtcaaaggtgtatctaactatttgaaaaaacacaagtggggtaataccaaaacatctgatttatgggaagctttgagtgaagcttccggtgaagatgtcgttaaggttatggatatctggactaagaacattgggttcccaattgtcaaagtagaagaaattggcaacggtgaaatcaaagtaactcaaaatcgtttcttggctaccggtgatgtcaaggaaagcgaagataaaaccttgtacccagtatttttgggattgaaaacaagtgaaggtgttgatgaatctctggtgttagaaacaagatccaagacaattaaactcccaacttctgatgattttttcaaaatcaacggtgaccaaagtggtatctacagaactgcatatgagccagcccgttggaccaaattgggtaaagctggtgttgaaggtaaactttcagttgaagatcgtgttggtttagtcgctgatgctggatccttggcttcttctggatttatcaaaacatctagtttgttggacttggtgaaatcttggtccaaggaaagcaactacgttgtctggaatgaaattttgaccagaattggatcaattaaagctgcacttatgtttgaagatgaagcaaccaaaaaagctttggaaattttcactagagatttaattagtgaaaaattgaaagaaactggttgggaattcagtgctgacgactcttttgctgaccaacaattgaaatcttcattgtttgcttctgctgcaaatgctgaagacccagaagctgttgctttcgctaaagaagcttttgctaaatttattgctggtgacaaaaaggctattcatccaaacttgagagcttcaattttcaatactaacgctaaatatggtgacgaaaaaacatttgacgaattgtacaacatctacagaaacccactgtcagttgaagaaaaaattgctgctttgagatcatttggtagatttactaaaccagagattttggacaaagttacaggtttgttattgcaaaccgatattgtcaaacaacaagatatttatatcccaatgcaaggattgagagcccacaaattgggtgttgaaaaattgtggacttggttatctgaaaactgggatcaaatttacattttgttaccacctggattatcaatgttaggatctgtagtcactttaggtacttctggtttcactaaggaagaacagaagaaaaaagttgaagaattctttgcacaaaaagacaataaaggttatgaccaaagtttggctcaatcattggacatcattactgctaagagtaaatggactgatcgtgacgccaaatcaatctatgaatggcttgaagcaaacgaatacactaaataa

SEQ ID NO: 869 - protein, 954 aa, Candida albicans SC5314
MFSTARKGVISSTGKYRPKLYHGITILNINKSFFSKIALTHDMVGKTPNSVNKNTNRHIFPFHKISNSGFSSGGQKLSYSKMCHHSRSSDNSASVVNQEREVLPTNVKPLHYDLTIEPIFDNFTFKGEETIDFQVNEKTNFITLNSLEIEVQEAKIDGKSVTDISFDAGKQTVTFKFDDDLSTGSIAKLYIKFTGELNDKMAGFYRASYQEDGKTKYMATTQMEPTDCRRAFPSYDEPAAKSKFTISLIADKELVCLSNSSEKETVSLDGNKKKVTFQTTPLMSTYLVAFIVGDLRYISNDNYRVPIRVYSTPGTEHLGEYSANIAAQTLKFFDQQFGIDYPYDKLDMVAVPSFSAGAMENCGLVTFRTVDLLIDADNANVNTKQRVTEVVMHELAHQWFGDLVTMEFWDGLWLNEGFATWMSWYACNSLYPDWKVWESYVSDSLQHALTLDALRASHPIEVPVKRADEINQIFDAISYSKGSSLLRMISKWLGEDVFVKGVSNYLKKHKWGNTKTSDLWEALSEASGEDVVKVMDIWTKNIGFPIVKVEEIGNGEIKVTQNRFLATGDVKESEDKTLYPVFLGLKTSEGVDESSVLETRSKTIKLPTSDDFFKINGDQSGIYRTAYEPARWTKLGKAGVEGKLSVEDRVGLVADAGSLASSGFIKTSSLLDLVKSWSKESNYVVWNEILTRIGSIKAALMFEDEATKKALEIFTRDLISEKLKETGWEFSADDSFADQQLKSSLFASAANAEDPEAVAFAKEAFAKFIAGDKKAIHPNLRASIFNTNAKYGDEKTFDELYNIYRNPSSVEEKIAALRSFGRFTKPEILDKVTGLLLQTDIVKQQDIYIPMQGLRAHKLGVEKLWTWLSENWDQIYILLPPGLSMLGSVVTLGTSGFTKEEQKKKVEEFFAQKDNKGYDQSLAQSLDIITAKSKWTDRDAKSIYEWLEANEYTK

SEQ ID NO: 870 - DNA, 3033 bp, Ustilago maydis 521
  CDS (1)..(3033)
atgcgtgctctcagtctgcttgtcggcaaaaagactcatctcattcttgcaacttctctcttcgctgccttccttgctcttcttgtaccttctgacgcaacttcttggctctggcagtcgctccgtgcagctacttgctcccttttctctcgtggacacgccacctgtacgcttgcagatcccgcttttgctcccgtctcttctgtcatgaccgacgctaccgaagcttccaagtggttccgcttgccccgcaacgtggtccccactcactacgacattacgctcaagtcggatctcgaggcgcttcaattcagcggaacggctaccatcgatcttgatgtcctcgaggacaccgactcaatcgtcttcaacgccgccgccaagctccacctcagcaagtcgctggtgctcagccaggcgctcaagactgacaacaagagcattgtcactctcgacatcgacagcaagcatgagcgagccacagcaaagctgcccaactcgctccccaagggctccaaggcacagctcgttgtggctttcgccagcgacatcgacaacagcatgatgggctattaccgctccacttgggagcacgagggaaagaagggctactacgccctcacccagttcgagcctaccgctgcccgacgtgccatccccacctgggatgagcccaacctcaaggccacctacaccttccgcatgatccaccgcaaagacaccactgcgctcgccaacatgaacgtcatcaactccaaggacatcactcagatcgagcaagaaaagctccttcgtgcagccgaacttggtctcgaccacgcttcgcttgctgccggaaggacggagggtaaaacggagggcaagaccgaaggcaagactgaaggcaagaccgaaggcaaaactgaggtctcttccaccgcctccaacgactggactcttaccgagtttgccaccacccccaaggtctcgacttacttagttgcatgggccaacggtccctttgttagcctcgagagcagctacaccagccctcttaccggcaaggttattcccatgaaggtatacactacgcccgagtacatccaccaggcccaatatgcgctcgacgtcaaggtgaaggtcttgcccgagtacgagcgcgtcttcgacgtcgcttatcccttgcccaagctcgacacgctcgttgcctcggatttcgatgctggcgccatggaaaactggggtctcatcaccgggcgaacctcggtgtacctctacgatgctgaaaaatcgggcttgcagggccagaagcgaaccgctggggtccagtcgcacgaagtggcccaccagtggtttggcaacatcgccactctggactggtgggacaacctgtggctcaacgaggctttcgctactttgatgggcgaggttgtcattcttgaccgatgtttccccgagtgggagtctgcctccgagttcatcaacatgcacctcgaccgcgccctcgacctcgacggcaaacgctccagtcaccccatcgaggtgcctctccaaggtgaaaacgtcgaggatgccatcaaccaagtgtttgacgccatttcttactccaagggcgccagtgtgctccgcatgctctccaatatgatcggcgaagacgtcttcctcaagggtgtctcgatctatctcaagaagcatctctacgccaacgccgtcactaaggatctttgggacggaatcagcgaggcttctggccaagacattgcttcgatcatggccaactggatcttgaagcagggcttccccgtcctcactgtcactgaagaagccgatggcgtgcgtatcaagcagaaccgcttcctttccactggtgatcccactcccgaagaggatgagacactctggcacgtgcctctgatgctcaagaccgtcggtgccgatggcaaggtctcggtagaccgtgacgctgtgcttaagagcgagcgtgaggtcacgctcccccttgctaacgccaaggacgccacttacaagctcaacgccgagaccattggcgtctaccgtgtcgcctattcgcccgagcgactcgccaagctcggcgaggaggctgctaagcccaactcggccttctcgctcgaggatcgcgtcggtctcgttgcggacgcgttcacgctcgcatccgcgggttacggcaagacttcgggaggtctttcgctactcaaggctctgaggaatgaccctacctacctggtcaaccaggcgtcgagtgtcaacctcggcacacttagcagcgcctggtgggagcaggacgccaaggtgcagaccgccatcaaaaagttgcgcgccgatatctttgggcacacggccaagaagctcgggttcgagtttggtgccaacgattcacccgacctcaagcagctgcgtgccaccgccatcgctgcggctgccaacggcgaggatgagtggacgctctctgagattaagaagcgctttgaccagtacattgcgactggagacgagagccagatccacccggacttgctgcgaaccgtctttgcgcgtgcggtcgagcacggcggggagaaggagtacgattcggtgcttgccatctaccgcaagccgcagacacctacgcataagatcgcagccatgctcgcgcttggtgcgtcttctgacgagaaattgctcgagcgcaccgtcgagtttgtctacagctccgaggttaaggagcaggactttatgtacttctttgcctcgctcagtggaaaccccaagggtcgacgaatcatctgggacgctaccaagtcgcgctgggacactttgtccaagcgttttgccggcaacttttcgcttagcagactcatcgagtactcgttcagcgccttcagctctgaaaaggatgcacaggacgtcgaggcgttcttcaaggacaaggacacggcgaaattcagcatgggtcttagccagggtctcgatgctgtcagggccaaggctagatggatcgagagggatgccaaggatgttgagcagtggttgaacgcgaatggctacctcgcttag

SEQ ID NO: 871 - protein, 1010 aa, Ustilago maydis 521
MRALSLLVGKKTHLILATSLFAAFLALLVPSDATSWLWQSLRAATCSLFSRGHATCTLADPAFAPVSSVMTDATEASKWFRLPRNVVPTHYDITLKSDLEALQFSGTATIDLDVLEDTDSIVFNAAAKLHLSKSLVLSQALKTDNKSIVTLDIDSKHERATAKLPNSLPKGSKAQLVVAFASDIDNSMMGYYRSTWEHEGKKGYYALTQFEPTAARRAIPTWDEPNLKATYTFRMIHRKDTTALANMNVINSKDITQIEQEKLLRAAELGLDHASLAAGRTEGKTEGKTEGKTEGKTEGKTEVSSTASNDWTLTEFATTPKVSTYLVAWANGPFVSLESSYTSPLTGKVIPMKVYTTPEYIHQAQYALDVKVKVLPEYERVFDVAYPLPKLDTLVASDFDAGAMENWGLITGRTSVYLYDAEKSGLQGQKRTAGVQSHEVAHQWFGNIATLDWWDNLWLNEAFATLMGEVVILDRCFPEWESASEFINMHLDRALDLDGKRSSHPIEVPLQGENVEDAINQVFDAISYSKGASVLRMLSNMIGEDVFLKGVSIYLKKHLYANAVTKDLWDGISEASGQDIASIMANWILKQGFPVLTVTEEADGVRIKQNRFLSTGDPTPEEDETLWHVPLMLKTVGADGKVSVDRDAVLKSEREVTLPLANAKDATYKLNAETIGVYRVAYSPERLAKLGEEAAKPNSAFSLEDRVGLVADAFTLASAGYGKTSGGLSLLKALRNDPTYLVNQASSVNLGTLSSAWWEQDAKVQTAIKKLRADIFGHTAKKLGFEFGANDSPDLKQLRATAIAAAANGEDEWTLSEIKKRFDQYIATGDESQIHPDLLRTVFARAVEHGGEKEYDSVLAIYRKPQTPTHKIAAMLALGASSDEKLLERTVEFVYSSEVKEQDFMYFFASLSGNPKGRRIIWDATKSRWDTLSKRFAGNFSLSRLIEYSFSAFSSEKDAQDVEAFFKDKDTAKFSMGLSQGLDAVRAKARWIERDAKDVEQWLNANGYLA

SEQ ID NO: 872 - DNA, 2538 bp, Streptococcus pyogenes str. Manfredo
  CDS (1)..(2538): transl_table=11
atgaagacagtagaacatctcatcgaaacatttgtgcctgaaaattataacatctttttagatattaatcgtcagactaaaacatttacggggaatgttgcgattaatggtgaagctttagataatcatgtggctttccatcaaaaagatttggacattaagtctattttgctcgataatgaagctgttatttatcaagtggataacgacaatgaagttgtgcgtgttgaattacctgaaacaggaatgatgacgcttgtcattgaattttcaggtagcattacagataatatgacaggtatttacccttcatattacactaaaaatggtgagaaaaaagaagtcatttcaactcagtttgaaagccattttgcacgtgaagctttcccatgtatcgatgaaccacaagcaaaagctacttttgatttaagcttgacctttgatcaagaaattggtgagatagcgttatcgaatatgccagaagtcaatattgaccgtcgcgaggagactggtctttggacatttgatacgacaccaagaatgtcatcttacttgctagcgtttgcgctaggagaacttcatggaaagactgtagaaagcaaaaaaggaacaactgttggtgtgtatgcgacaacagcgcatcctcttagctcgcttgatttttcattggatattgcagttcgtgttattaacttttatgaagactattttggagtacattacccaatcccgcaatctcttaatattgcgcttccagatttttcatctggtgctatggaaaattggggtttaatcacttatcgtgaaatttatttattagtagatgaaaattcgactgttcaaagccgacaacaagtggcacttgtaatcgcccacgagatagcacaccaatggtttggaaacttggttacaatgaaatggtgggacgatctgtggttaaatgagagttttgccaacatgatggaatatgtctctatcgaggctattgagccgtcttggaaaataatagaagatttccaaacaggcggtattcctcttgctttaaaacgtgatgctactgatggtgttcaatcagtgcatgttgaagtcaatcatccagatgaaataaatacattgtttgatcctgctattgtctatgcaaaaggtagtcgtttgatgcatatgttacgccgttttattggtgatcgtgattttgccattggcttacatcactactttgaaaaatatcaatatcgaaatactgtcgggcgtgatttatggaatattttatcagatacttcaggcaaagacgtagctgcttttatggatgcttggcttgaacaaccaggttatccagttttaacagctcgccttgaaaacgatcaattgattttgagtcaaaaacaattttttattggaaaaggtgaagaaaaaggtcgcctttggccgattcctttaaacactaattggcatggccttcctgaaactttgacagaggcagaaatggtcattccaaactttagtcaattggcagcagaaaatgaaggagctctacgtttcaatattgataatacagctcattacattacagattaccaaggatcattattagatgccttagtcactgaacttgcccaacttgataatacttctgctttacaagttattcaagaacgtcgtttattggcagatagtggcttgatttcctatgctgaattggttgacttaattgctcaattggacgattctaagtcttatatggtagcagaagcggttcagcaagtggtctctggtttgaaacgcttcattgatgaaggaagcttagcagaaaaatcctttaatcgcttggtaaccaccatctatcaagaagactttaatcagcatggttttgagaaaaaagctgacgaatcagatgaagatgagatggtacgtcaggttgccttgggacgcttgtggctagcagaaaatcagacgattattgacggattgagaactatttttgaagcatatcaaaacaatattgcaagtattccagcagctgttcgtcgcttggttttagccaaccaaatgaaatattttgaaacagatagcttggttgatatttattttgagacttatgtagcaactactgataataatttacgcagtgatttaacggttgcttttagtcaaacaaaacaactaactactattagacgtattcttgttagtttaaaagataaagatattattaaacctcaggatttatcttattggtacaatgctttacttggacaaagctttactcaagatatcatttgggaatgggctagagaaaattgggattggattaaatctgcacttggtggagatatgagctttgataaatttgttatttatccagcaagtaactttaaaacaccaaaacatctagcagaatataaatctttctttgaacctaagctagatgatatggctattagccgtaatattaccatgggaattaatgaaattgaagcacgtgttgctttgatcactaaagaaaaagaagcagttattgcagctctcagtcattactag

SEQ ID NO: 873 - protein, 845 aa, Streptococcus pyogenes str. Manfredo
MKTVEHLIETFVPENYNIFLDINRQTKTFTGNVAINGEALDNHVAFHQKDLDIKSILLDNEAVIYQVDNDNEVVRVELPETGMMTLVIEFSGSITDNMTGIYPSYYTKNGEKKEVISTQFESHFAREAFPCIDEPQAKATFDLSLTFDQEIGEIALSNMPEVNIDRREETGLWTFDTTPRMSSYLLAFALGELHGKTVESKKGTTVGVYATTAHPLSSLDFSLDIAVRVINFYEDYFGVHYPIPQSLNIALPDFSSGAMENWGLITYREIYLLVDENSTVQSRQQVALVIAHEIAHQWFGNLVTMKWWDDLWLNESFANMMEYVSIEAIEPSWKIIEDFQTGGIPLALKRDATDGVQSVHVEVNHPDEINTLFDPAIVYAKGSRLMHMLRRFIGDRDFAIGLHHYFEKYQYRNTVGRDLWNILSDTSGKDVAAFMDAWLEQPGYPVLTARLENDQLILSQKQFFIGKGEEKGRLWPIPLNTNWHGLPETLTEAEMVIPNFSQLAAENEGALRFNIDNTAHYITDYQGSLLDALVTELAQLDNTSALQVIQERRLLADSGLISYAELVDLIAQLDDSKSYMVAEAVQQVVSGLKRFIDEGSLAEKSFNRLVTTIYQEDFNQHGFEKKADESDEDEMVRQVALGRLWLAENQTIIDGLRTIFEAYQNNIASIPAAVRRLVLANQMKYFETDSLVDIYFETYVATTDNNLRSDLTVAFSQTKQLTTIRRILVSLKDKDIIKPQDLSYWYNALLGQSFTQDIIWEWARENWDWIKSALGGDMSFDKFVIYPASNFKTPKHLAEYKSFFEPKLDDMAISRNITMGINEIEARVALITKEKEAVIAALSHY

SEQ ID NO: 874 - DNA, 2598 bp, Streptococcus pyogenes MGAS10394
  CDS (1)..(2598): transl_table=11
atgatacttaggtatcatctgttgatctattataatttgttattagaattaaggagttatatgaagacagtagaacatctcatcgaaacatttgtgcctgaaaattataacatctttttagatattaatcgtcagactaaaacatttacggggaatgttgcgattaatggtgaagctttagataatcatgtggctttccatcaaaaagatttggacattaagtctattttgctcgataatgaagctgttatttatcaagtggataacgacaatgaagttgtgcgtgttgaattacctgaaacaggaatgatgacgcttgtcattgaattttcaggtagcattacagataatatgacaggtatttacccttcatattacactaaaaatggtgagaaaaaagaagtcatttcaactcagtttgaaagccattttgcacgtgaagctttcccatgtatcgatgaaccacaagcaaaagctacttttgatttaagcttgacctttgatcaagaaattggtgagatagcgttatcgaatatgccagaagtcaatattgaccgtcgcgaggagactggtctttggacatttgatacgacaccaagaatgtcatcttacttgctagcgtttgcgctaggagaacttcatggaaagactgtagaaagcaaaaaaggaacaactgttggtgtgtatgcgacaacagcgcatcctcttagctcgcttgatttttcattggatattgcagttcgtgttattaacttttatgaagactattttggagtacattacccaatcccgcaatctcttaatattgcgcttccagatttttcatctggtgctatggaaaattggggtttaatcacttatcgtgaaatttatttattagtagatgaaaattcgactgttcaaagccgacaacaagttgcacttgtaatcgcccacgagatagcacaccaatggtttggaaacttggttacaatgaaatggtgggacgatctgtggttaaatgagagttttgccaacatgatggaatatgtctctatcgaggctattgagccgtcttggaaaataatagaagatttccaaacaggcggtattcctcttgctttaaaacgtgatgctactgatggtgttcaatcagtgcatgttgaagtcaatcatccagatgaaataaatacattgtttgatcctgctattgtctatgcaaaaggtagtcgtttgatgcatatgttacgccgttttattggtgatcgtgattttgccattggcttacatcactactttgaaaaatatcaatatcgaaatactgtcgggcgtgatttatggaatattttatcagatacttcaggcaaagacgtagctgcttttatggatgcttggcttgaacaaccaggttatccagttttaacagctcgccttgaaaacgatcaattgattttgagtcaaaaacaattttttattggaaaaggtgaagaaaaaggtcgcctttggccgattcctttaaacactaattggcatggccttcctgaaactttgacagaggcagaaatggtcattccaaactttagtcaattggcagcagaaaatgaaggagctctacgtttcaatattgataatacagctcattacattacagattaccaaggatcattattagatgccttagtcactgaacttgcccaacttgataatacttctgctttacaagttattcaagaacgtcgtttattggcagatagtggcttgatttcctatgctgaattggttgacttaattgctcaattggacgattctaagtcttatatggtagcagaagcggttcagcaagtggtctctggtttgaaacgcttcattgatgaaggaagcttagcagaaaaatcctttaatcgcttggtaaccaccatctatcaagaagactttaatcagcatggttttgagaaaaaagctgacgaatcagatgaagatgagatggtacgtcaggttgccttgggacgcttgtggctagcagaaaatcagacgattattgacggattgagaactatttttgaagcatatcaaaacaatattgcaagtattccagcagctgttcgtcgcttggttttagccaaccaaatgaaatattttgaaatagatagcctggttgatatttattttgagacttatgtagcaactactgataataatttacgcagtgatttaacggttgcttttagtcaaacaaaacaactaactactattagacgtattcttgttagtttaaaagataaagatattattaaacctcaggatttatcttattggtacaatgctttacttggacaaagctttactcaagatatcatttgggaatgggctagagaaaattgggattggattaaatctgcacttggtggagatatgagctttgataaatttgttatttatccagcaagtaactttaaaacaccaaaacatctagcagaatataaatctttctttgaacctaagctagatgatatggctattagccgtaatattaccatgggaattaatgaagttgaagcacgtgttgctttgatcactaaagaaaaagaagcagttattgcagctctcagtcattactag

SEQ ID NO: 875 - protein, 865 aa, Streptococcus pyogenes MGAS10394
MILRYHLLIYYNLLLELRSYMKTVEHLIETFVPENYNIFLDINRQTKTFTGNVAINGEALDNHVAFHQKDLDIKSILLDNEAVIYQVDNDNEVVRVELPETGMMTLVIEFSGSITDNMTGIYPSYYTKNGEKKEVISTQFESHFAREAFPCIDEPQAKATFDLSLTFDQEIGEIALSNMPEVNIDRREETGLWTFDTTPRMSSYLLAFALGELHGKTVESKKGTTVGVYATTAHPLSSLDFSLDIAVRVINFYEDYFGVHYPIPQSLNIALPDFSSGAMENWGLITYREIYLLVDENSTVQSRQQVALVIAHEIAHQWFGNLVTMKWWDDLWLNESFANMMEYVSIEAIEPSWKIIEDFQTGGIPLALKRDATDGVQSVHVEVNHPDEINTLFDPAIVYAKGSRLMHMLRRFIGDRDFAIGLHHYFEKYQYRNTVGRDLWNILSDTSGKDVAAFMDAWLEQPGYPVLTARLENDQLILSQKQFFIGKGEEKGRLWPIPLNTNWHGLPETLTEAEMVIPNFSQLAAENEGALRFNIDNTAHYITDYQGSLLDALVTELAQLDNTSALQVIQERRLLADSGLISYAELVDLIAQLDDSKSYMVAEAVQQVVSGLKRFIDEGSLAEKSFNRLVTTIYQEDFNQHGFEKKADESDEDEMVRQVALGRLWLAENQTIIDGLRTIFEAYQNNIASIPAAVRRLVLANQMKYFEIDSLVDIYFETYVATTDNNLRSDLTVAFSQTKQLTTIRRILVSLKDKDIIKPQDLSYWYNALLGQSFTQDIIWEWARENWDWIKSALGGDMSFDKFVIYPASNFKTPKHLAEYKSFFEPKLDDMAISRNITMGINEVEARVALITKEKEAVIAALSHY

SEQ ID NO: 876 - DNA, 2550 bp, Streptococcus agalactiae A909
  CDS (1)..(2550): transl_table=11
atgaaaactgtagaacattttgttaccaaatttgtccctgaaaactataaccttttcttggatattaatcgtcaaactaaaaccttttcaggtaacgttgctgtgtctggcgaagccttagataacaatatctcttttcaccaaaaagggttaaccattaaatctgtcttattagataatcaaccattagatttccaactagatgaagacaatgaagctatgcatattcaattgcatgaaactggtagcatggtattagtctttgaattcagcggtcacattaccgataatatgacaggtatgtatccatcttactatacagttaatggcatcaaaaaagaggttatctccacacaatttgaaagtcattttgctcgtgaagtattcccaagtattgacgaaccagaagcaaaagcaacctttgatttgagcctaaaattcgatcaaaaagaaggagagattgctctttcaaatatgccggaaatcaatgctgaacaacgtcaagaaacaggtttatggacatttgacaccacacctaaaatgtcctcatatttattagcttttgccttgggggaattgcatggtaaaacaacacataccaaaaacggcactcttgttggctcatatgccacaaaagcccatcagttaaatgaattagatttttctttagatatcgttgtgcgtgttattgagttttatgaggactactttggtgtacgttatcctattcctcagtcactccatgttgctctacctgatttttctgctggagctatggaaaattggggattagtaacatatcgtgaagtctatcttttagtagatgagaactctagtgtttccagccgtcagcaagtagcattagttgtagcacatgaaatagctcaccagtggtttggtaacctcgttactatgaaatggtgggatgatttatggttaaatgaatcatttgctaatatgatggaatatgtatcaattgattatattgaaccaaaacttaatatatttgaagactttcaaacaggtggtctaccattagctcttaagcgtgatgccacagatggcgtccaatctgttcacgttgaggtcaatcatcctgatgaaattaacacactttttgatccagctatcgtttatgcaaaaggtagccgcctcatgcacatgttacgtcgctggttaggcgatacagattttgccgcaggactaaaaatttattttgaaaaacatcaatatcaaaatactattggtcgtgacctttggaatgcactttctcaaacctcaggaaaagatgttgcagctttcatggattcttggttagagcaaccaggataccctgtgatggcagccaaaatagaagaagatgagctcattttaactcaaaaacaattctttattggtgaacacgaagataagtctcgcttgtggcaaattcctcttaatagtaattgggaaggaatcccagagatattaaccgaggaaacggtagtaatccccaattttagtcagttagctgaaaagaacaaagaaaatggtgcactgcgtttcaatactgaaaatactgcacattacattactaactatcaaggtcaactcttagagcatatcatttctgatcttcctcttatggataacatttctaaactacaaattgtacaagaacgtcatttacttgctgaaagtggtatgatttcatatagtagtttaatacctttagtctctcttttgagccaagagacatcatatcttgttaactctgctattaagagtgttattgatggtttatccttattcgtccaggaagatagccaagatgaattcgactttaaagaatttgttaataaattatcagcatttaattttaatagacttggctttgaaaaaagagaaggagaaggagatgatagcgaaatggtccgtcatctatccctaagccttgctctctactcagataatgaacatgctattgaagaagctcaccatatttttaaagcccacgaaaataatatcgctgctataccagctgcaattcgcctgttagttcttaccaatgaaatgaagcatttcgaatccaaagaacttagccacttgttattagagacttatagtactactaccgatgggaatttcaaacgacaactagcgagtgctttatctcatactacagatagcaagacactcaagaaattattgtcagattggaaaaataaagatattgtgaaaccacaagacttagctatgagttggtatgctactttccttaaaaattcttttacacaagaaagtgtctgggagtgggcccaagaaaactgggaatggatcaaagcaactctaggtggtgatatgagttttgataaatttgtgatttatccctcaagtagtttcaaaacagaagaacgccttgaacaatataaaaactttttcgagcctcaattaagcgatatggcgattagccgtaatatttcaatgggaattaaagaaatttctgctcgtgtccttttaatcacgaagcaaaaagaagaagttatcaatactatcaaaaaatatatctaa

SEQ ID NO: 877 - protein, 849 aa, Streptococcus agalactiae A909
MKTVEHFVTKFVPENYNLFLDINRQTKTFSGNVAVSGEALDNNISFHQKGLTIKSVLLDNQPLDFQLDEDNEAMHIQLHETGSMVLVFEFSGHITDNMTGMYPSYYTVNGIKKEVISTQFESHFAREVFPSIDEPEAKATFDLSLKFDQKEGEIALSNMPEINAEQRQETGLWTFDTTPKMSSYLLAFALGELHGKTTHTKNGTLVGSYATKAHQLNELDFSLDIVVRVIEFYEDYFGVRYPIPQSLHVALPDFSAGAMENWGLVTYREVYLLVDENSSVSSRQQVALVVAHEIAHQWFGNLVTMKWWDDLWLNESFANMMEYVSIDYIEPKLNIFEDFQTGGLPLALKRDATDGVQSVHVEVNHPDEINTLFDPAIVYAKGSRLMHMLRRWLGDTDFAAGLKIYFEKHQYQNTIGRDLWNALSQTSGKDVAAFMDSWLEQPGYPVMAAKIEEDELILTQKQFFIGEHEDKSRLWQIPLNSNWEGIPEILTEETVVIPNFSQLAEKNKENGALRFNTENTAHYITNYQGQLLEHIISDLPLMDNISKLQIVQERHLLAESGMISYSSLIPLVSLLSQETSYLVNSAIKSVIDGLSLFVQEDSQDEFDFKEFVNKLSAFNFNRLGFEKREGEGDDSEMVRHLSLSLALYSDNEHAIEEAHHIFKAHENNIAAIPAAIRLLVLTNEMKHFESKELSHLLLETYSTTTDGNFKRQLASALSHTTDSKTLKKLLSDWKNKDIVKPQDLAMSWYATFLKNSFTQESVWEWAQENWEWIKATLGGDMSFDKFVIYPSSSFKTEERLEQYKNFFEPQLSDMAISRNISMGIKEISARVLLITKQKEEVINTIKKYI

SEQ ID NO: 878 - DNA, 2634 bp, Acidobacteria bacterium Ellin345
  CDS (1)..(2634): transl_table=11
atgcatccgaaaggcctgatgaagaagcttctgttgctgttcgctcttatgactgcggcgacgttctgctccgcgcagcgtctgcccggcaacgttgttcccgatcattattcgctgaagttcgcgcccgatttttccagcagcactttccagggcgacgagaccattgacgtgcgggttctctccgcaaccgatgccattgtcctcaacgctcttgaactggaaatcaaatctgcgacagtgacggttgccggcaaggagctcacagccagcgtcaccgcggatgccgagaacgagaccgtcacgctgcacgttccctcgcaactcacggtaggctcagccacgatccacatcggatataccggccgactgaacgacaagctccgcggtctctatcgcagcgaagccaataatcgccgctacgccgtgagccagttcgaggccgtggatgcccgggtcgccttcccatccttcgacgagccttcttataaggcgactttcgacatcacgaccgtcgtggaccaaggcgacactgccatctcgaatggccgcatcgtgagcgatgagcccggtccggcagggaagcacaccatcaagttctcgaccacgccgaagatgtcgagctatctcgtagcgctcaccgtcggtgactggaagtgcatctctggcgagcaagacggcatcgcgcttcgcatttgctcggtgcccggcaaggaacagcagggagcgttcgctctcgaggcgaccaaggcgattctgcatttctacaatcagtacttcgggatcaagtatccctatggcaagctcgaccagatcgcagctcctgacttcgaagccggcgcgatggagaacaccgccgccatcgtctatcgagagagcgcgctgctgctcgatcctgcaaaagcatcggttaacgatcagaaggaaatttcatcggtcatcgcgcatgagatggcgcaccagtggttcggcgatctcgtcaccatgaagtggtggaacgacatctggctgaatgagggttttgccacttggatggagagcaagccggtcgcagcgtggaagcccgagtggcaaatctcgcaggacgatgttctcggctccagctccgcgctcaacaccgactcaacgcagaacacccgccccatccgccagcaagcggaaacccgcaacgagatcaacgcgctgttcgacggcatcgcttatggcaagactgccgccgtcctgcggatgctcgagggctacatcggtccagaagtcttccgcaaaggcgtaaacagctatctggaagcgcacaagtacggcaacgctaccgccgaagatttctggggcgcgatggcgaaggcctcaggtcgaccgatcgacaagctcatgccgacgttcgtcacgcagcccggagcggcatacatcgcgctaacggacaagtgcgagaacaacgagactgtcggtacgatcacccagcaacgcttctactcctcgccgaagctcatgcagagcacgtctgaccaactctggcaggtgccggtctgcagcaacgaaatcggcggagcaggaaccgccagttgcgaattgctgacgcagaagcagcagtcgttcaagctcaagggctgcggccatggcgttatggggaactcgaagggtagtggctactatcgttatagcttcgatcccgccgagtaccagtcgccgaacttcaagatggaagaactgcctgaagaagaccaggtctcgctggttggcaacgaaggcgcactgctcgccgccggggttcaccacatccaggacttcatggccatgacggagaagttccgcggcgtccccacgtacggcgcagtgagcgaactcgcggaccacctgactttcgccgaccggcatctggtctccgaccaggaccgcgaacaattccggtcgtgggtgcgcagcgtgttcaagccgactctcgagaaggtcggcacggtttcgtctaaatctgacactccgggccagcgcaacacgcgagcgacgctcgtagaacttctcggcaacgtcggcgaagatcccgatgccatcgccctcgcgaagcagacggtcaacgcctacatgcaggaccctgcgtcggtggataccaccctcgtggacgcgtcgttcccagttgctgccgcacacggcgatgcctcgctctacgacatcttcctcgcgaaaacgaagcaggcttcgtcaccgcaggactactaccgttacgttcacgcacttcgcgacttccgcgatccggtgctgctcaaacgcaccctcgagtggaccctcggtcccgaagttcgcaaccaggaccttcggggtctcgtcggcgtgctctcgaatcccgccggccagcaattgacctgggatttcattcgacaacgctggagtgacattcagaacaaggccggacaaagcatcgtgggcgcgcaattggcgtattacgcgattggggtcttctgcgatgcggagcatgcgaaggaagcgcagtccttcattgatcagcaccgcgttcagggtttggatcgcatcgcgcgccagcagatggagcgcgttggtcagtgcattgacctccgccagcgcgaagaacccaatctcgcgcgcttccttcagaagtcagggaacggcagcgggcagcactag

SEQ ID NO: 879 - protein, 877 aa, Acidobacteria bacterium Ellin345
MHPKGLMKKLLLLFALMTAATFCSAQRLPGNVVPDHYSLKFAPDFSSSTFQGDETIDVRVLSATDAIVLNALELEIKSATVTVAGKELTASVTADAENETVTLHVPSQLTVGSATIHIGYTGRLNDKLRGLYRSEANNRRYAVSQFEAVDARVAFPSFDEPSYKATFDITTVVDQGDTAISNGRIVSDEPGPAGKHTIKFSTTPKMSSYLVALTVGDWKCISGEQDGIALRICSVPGKEQQGAFALEATKAILHFYNQYFGIKYPYGKLDQIAAPDFEAGAMENTAAIVYRESALLLDPAKASVNDQKEISSVIAHEMAHQWFGDLVTMKWWNDIWLNEGFATWMESKPVAAWKPEWQISQDDVLGSSSALNTDSTQNTRPIRQQAETRNEINALFDGIAYGKTAAVLRMLEGYIGPEVFRKGVNSYLEAHKYGNATAEDFWGAMAKASGRPIDKLMPTFVTQPGAAYIALTDKCENNETVGTITQQRFYSSPKLMQSTSDQLWQVPVCSNEIGGAGTASCELLTQKQQSFKLKGCGHGVMGNSKGSGYYRYSFDPAEYQSPNFKMEELPEEDQVSLVGNEGALLAAGVHHIQDFMAMTEKFRGVPTYGAVSELADHLTFADRHLVSDQDREQFRSWVRSVFKPTLEKVGTVSSKSDTPGQRNTRATLVELLGNVGEDPDAIALAKQTVNAYMQDPASVDTTLVDASFPVAAAHGDASLYDIFLAKTKQASSPQDYYRYVHALRDFRDPVLLKRTLEWTLGPEVRNQDLRGLVGVLSNPAGQQLTWDFIRQRWSDIQNKAGQSIVGAQLAYYAIGVFCDAEHAKEAQSFIDQHRVQGLDRIARQQMERVGQCIDLRQREEPNLARFLQKSGNGSGQH

SEQ ID NO: 880 - DNA, 2553 bp, Myxococcus xanthus DK 1622
  CDS (1)..(2553): transl_table=11
atggcgcatccgaccgaagacaagaacttccgcctgccgacctccatccgtccccgccgctacgcggccacgctgaccctggacctggacgcgaagtccttctccggccagcagaccatcgacctggacgtggcggcgccgtcgaacgaaatcatcctgcacggcatcgccctggcgctgagcgacgtgacgttccgcgccggtggccagcagcgcaagccggcctccatccagcccgcgcaggcgagcgagacggtggtgctccgcttcgatgaagcgctgcccacgggcgccgcgtcgctggacgtcgcgtggacggggcgcttcacggaagggctgcgcggcctgtaccaggcgggcaaggtggcggccacccagttcgaggccgccgacgcgcgccgactcttcccctgcttcgacgagcccgccttcaaggcgcgctgggccctcaccgtccgcgtcccgacggggctcaccgtgctgggcaacggcccggtggtgaaggacacgcaggagggcaacctgcgcgcggtgacgttccaggagacggaggtgctcagcagctacctcatcgccctggtggtgggcccgctggtgggcacggacgcgcaggacgtgcagggcgtgccggtgcggacctgggcgctgccggagaaggcgcacctgacgcgcttcggccaggacgtggcgctggcggtgctgcccaggctccaggactacttcgggctgccgtatgccttcaccaagctggaccaggtgggcatccccgacttcgaggccggcgccatggagaacgccggcctgattacctaccgcgaggtggcgctgctgctggacccggccaccgcgccgctgtcggtgaagaagcgcgtggcggaggtggtgacgcacgaactggcgcaccagtggttcggcaactgggtcaccatggtgtggtgggacgacctgtggctcaacgaggcgttcgccacgtggatggccttcaagattgtggaccagtggcgccccgagtggcgcatgtggctggacttcgacgcgcaccgcgccagcgcgctgcatctggacgcgctcaagtccacgcaccccatccacggcgaggtgcgcaacgcgggcgaggccggtgagagcttcgacgcgattacgtacgagaagggcggcgcggtgctgcggatgattgagggcttcctcggggaaggccccttccgcgagggcatccgccagtacatgcgcaagcacgcgcgcgccaacgcagtgaaggaagacttgtggaacgcgctgggcgacgccgcgaagcagccggtggaggagctggccaccgcgtgggtgggccagagcggcttcccgttggtgacggcgacgctggacgggcgcgggctgtcgctgtcgcagcggcgctactacagcgagcccggtgtgcagagcgctgaggtgtggccggtgccggtggtgctgcgctacgaggacagcaccggcgtgcgcgagcagcgcgtgctgctgcgggacgcccaggccacggtgaagctggagggcgaaggcgcggtgaagtggctgacggccaacgcgggctccaccggcttctaccgggtcgcctacgacaagccgggcctggagaagctggcgacgaacctgaagtcgctggccccctccgagcgcaccgccctgctggcggaccagtgggcgctggtgcgcgcgggccaggcgtcggtggcggacctgctggaccttgcgggccgcttcggtgacgaggaggacgactccgtcctggacgagctggtgggccggctggcctacatcgaaggccggctggcggacggcgaggaccaggtccgcttccgcgcgtgggtggagaagctgctggggccagggctgaagaagctgggctggcagtccgcgccgaacgaggcggaccgggtgaagctgcggcgcgcgtcgctggtgcgcgcggtgggtggcctggcgcgcagccaggacgcgctcgccgaggcccggccccgcgtggagcgcatgctccagggacagcgagacgcgctggagcccaacctgctggacgccgcggtgggcatggtggcgcgcgcgggcgacgcggcgctcttcgacaccttcctccagaagattccgtccgagcccgaccctgccacgcagcgccgctacctcatggcgctcaccgccttcgaggcccccgaactcaccgcgcgcgcgcgcgggctgctctacacggacacggtgaagacgcaggacgtggccagcttcgtggcggggctgctgggcaaccgcgtcggccgcgacgcgtggtgggcgcagatgcgcacgcaatggaaggacgtggtggcccgcaccggcggcgcccccatgctgctgcgccgcatcgtcgaggccatgggcatgctgcgcacgcgcgagcacctggagcagatgcaggccctgctcaaggcccagcccatccccgaggcgcagcaggccacggcgcagacactggagcggctgtcccaggatgtggcgctgcgtgagcgctgcatgcccgaggtctccgcgtggctgaagcgccagccgtga

SEQ ID NO: 881 - protein, 850 aa, Myxococcus xanthus DK 1622
MAHPTEDKNFRLPTSIRPRRYAATLTLDLDAKSFSGQQTIDLDVAAPSNEIILHGIALALSDVTFRAGGQQRKPASIQPAQASETVVLRFDEALPTGAASLDVAWTGRFTEGLRGLYQAGKVAATQFEAADARRLFPCFDEPAFKARWALTVRVPTGLTVLGNGPVVKDTQEGNLRAVTFQETEVLSSYLIALVVGPLVGTDAQDVQGVPVRTWALPEKAHLTRFGQDVALAVLPRLQDYFGLPYAFTKLDQVGIPDFEAGAMENAGLITYREVALLLDPATAPLSVKKRVAEVVTHELAHQWFGNWVTMVWWDDLWLNEAFATWMAFKIVDQWRPEWRMWLDFDAHRASALHLDALKSTHPIHGEVRNAGEAGESFDAITYEKGGAVLRMIEGFLGEGPFREGIRQYMRKHARANAVKEDLWNALGDAAKQPVEELATAWVGQSGFPLVTATLDGRGLSLSQRRYYSEPGVQSAEVWPVPVVLRYEDSTGVREQRVLLRDAQATVKLEGEGAVKWLTANAGSTGFYRVAYDKPGLEKLATNLKSLAPSERTALLADQWALVRAGQASVADLLDLAGRFGDEEDDSVLDELVGRLAYIEGRLADGEDQVRFRAWVEKLLGPGLKKLGWQSAPNEADRVKLRRASLVRAVGGLARSQDALAEARPRVERMLQGQRDALEPNLLDAAVGMVARAGDAALFDTFLQKIPSEPDPATQRRYLMALTAFEAPELTARARGLLYTDTVKTQDVASFVAGLLGNRVGRDAWWAQMRTQWKDVVARTGGAPMLLRRIVEAMGMLRTREHLEQMQALLKAQPIPEAQQATAQTLERLSQDVALRERCMPEVSAWLKRQP

SEQ ID NO: 882 - DNA, 2535 bp, Pediococcus pentosaceus ATCC 25745
  CDS (1)..(2535): transl_table=11
atggctaaaattacgcgtctttatgatttatttcaacccgaacactacgatatatttttagatatcagccgtgaaactaagcattttcgtggtaaaacggtcattcaggggatagcccagcagaccgaaattgcacttcaccaaaaggatttagaagttatggtggtttatgttaatgatgagaaaacgccttttgaaattgattcagcaaatgaagtgattcgtctgcaactaagtcaagctggtaatgtaactttgactgttgaatacgaagctgaactaacggacagcatgatgggaatttatccatcatactatgaagtcgatggagttcaaaaacagttggttggtacccagtttgaaacaacttttgctcgacaagcctttcctgggattgatgaaccagaggctaaggcaacttttgatttagcaataaagtatgacgaacatgatggagaaaccattttaagtaatatgcctgaaattaaggtagtcgatggaattcattattttgatacgacggttaaaatgtcgacatatttaatcgcttttgcttttggagatcttcaaagtaaaatgacaaagacgactagcggcgtgcaagtcggagtctttgctactaaagctcatcaagctcaagaacttgattttgcacttgatattgccaaacgttcaatcgaattttatgaagaattctaccatacagcttatccgttgccccattcatggcaactagctctacctgatttttcagccggagcaatggaaaactgggggctagtaacatatcgtgaagcctatcttttattagatcctaagaacacggctctagaaactaaacaactagtggcaaccgtcatcgcgcacgagttagctcatcagtggtttggtgatttagttaccatgcaatggtgggatgatttatggttaaatgaaagtttcgccaatatgatggaatacgtagcaattgatgcgattgaacctgattggcatatttgggaaatgttccaaacgtccgatgttcctgcagccttacagcgagatgctactgatggtgtacagtctgttcatgtgcaggtccaaaacccagctgagatagacgcgctatttgatggagccatcgtgtatgctaaaggagcacgtatgctagtaatggtgcgggccttgattggcgatgacgctttacgtaccggattgaagcagtattttaataatcaccagtatggaaatgcaaaaggggcggacttatgggctgctctaggagacgctgcggggattgacgtcggagcaatcatgcactcatggttggaacaaccgggttatcccgtagtgaatgttgaagtggtcgatggccaattaactattagtcaacaacaatttttcattggtgaaggacaaaatgcaggacggcaatggcaaatcccattaaaaggtaactatgaagtcgttcctcaaattttagatcaacctactttatcgttaggcgattatcaacagcttcgaaatgaaaatgggcaacctttccgactcaatgttggcaacgaatctcatttcatcgtccattatgctaaggatttattagcggatatcttgggagcattggaccaactaggagcaattgatcagctgcaaattctccaagacttaagattattagctgaaggaaatcaaatttcgtatgctgaaattgtaccgctactggaaaaatttgctgatagttcatcagcggtagttaacgatgttttatatcgcttggctggtgatttgaagaaatttgttcagcctgatagtgaagaagaggcgaaccttcaaaaacttttcaatcaacttagtgcaaaacaggtacaacgtttaggttggaaaccaagggccgcggaaagtaatgatgatcagttaactcgaccttatgtattgggagccgaattatacgcgaagaatcctgaagcaattttagcagcacatgaactttttgaacaaaatcaaaatcagttatccaacttgtcagccgatattcgtagtcatgttttgagtaacgaagtgaaaaactttaataacgaacgactatttaaccagttaatggaacagtaccgtcaatcgactgatccaagttataaagctgatttaagtagagcactcactgctactacggatgaaaagcaaatcaaagctattattgaaaaatttgaggatgctagcacgattaaaccccaagatttgcgagcttggttccgaggtctattagctaatgctaaagggcaacaattaacttgggattggattcgaaatgattggaaatggttggaagatactgtgggtggtgatatggaatttaataccttcatcacggtgattgctaatatatttagaacaccagcacggttggaggaattcaaagccttcttcgaacctaaattgcaaacgccaggcttaacacgtgaaattacaatggacattaaagtcattgaaggtcgagtgaagttaatacaagccgaaaaagcagctgttaatacagccatcgaaaagataattgcataa

SEQ ID NO: 883 - protein, 844 aa, Pediococcus pentosaceus ATCC 25745
MAKITRLYDLFQPEHYDIFLDISRETKHFRGKTVIQGIAQQTEIALHQKDLEVMVVYVNDEKTPFEIDSANEVIRLQLSQAGNVTLTVEYEAELTDSMMGIYPSYYEVDGVQKQLVGTQFETTFARQAFPGIDEPEAKATFDLAIKYDEHDGETILSNMPEIKVVDGIHYFDTTVKMSTYLIAFAFGDLQSKMTKTTSGVQVGVFATKAHQAQELDFALDIAKRSIEFYEEFYHTAYPLPHSWQLALPDFSAGAMENWGLVTYREAYLLLDPKNTALETKQLVATVIAHELAHQWFGDLVTMQWWDDLWLNESFANMMEYVAIDAIEPDWHIWEMFQTSDVPAALQRDATDGVQSVHVQVQNPAEIDALFDGAIVYAKGARMLVMVRALIGDDALRTGLKQYFNNHQYGNAKGADLWAALGDAAGIDVGAIMHSWLEQPGYPVVNVEVVDGQLTISQQQFFIGEGQNAGRQWQIPLKGNYEVVPQILDQPTLSLGDYQQLRNENGQPFRLNVGNESHFIVHYAKDLLADILGALDQLGAIDQLQILQDLRLLAEGNQISYAEIVPLLEKFADSSSAVVNDVLYRLAGDLKKFVQPDSEEEANLQKLFNQLSAKQVQRLGWKPRAAESNDDQLTRPYVLGAELYAKNPEAILAAHELFEQNQNQLSNLSADIRSHVLSNEVKNFNNERLFNQLMEQYRQSTDPSYKADLSRALTATTDEKQIKAIIEKFEDASTIKPQDLRAWFRGLLANAKGQQLTWDWIRNDWKWLEDTVGGDMEFNTFITVIANIFRTPARLEEFKAFFEPKLQTPGLTREITMDIKVIEGRVKLIQAEKAAVNTAIEKIIA

SEQ ID NO: 884 - DNA, 2535 bp, Oenococcus oeni PSU-1
  CDS (1)..(2535): transl_table=11
atgactgaatttaaacatttttttgaaacatttcaaccggaacattatgaaatttttttggatatcaatcgagaaaacaaaaagttttctggtaaaacaacaattagcggcaatgcaaaaaacactaaaattgccatccatgaaaaggatttaacaattaaatctgttcaatctgatggacatgacttgtcatttaatattgatcccgaattagatgcgattaagattgaattacctcagaccggtaaaacaagtttgacgataagttacagagcaactttaaccgatagtatgatgggaatttatccttcatattacgaagttaatggcgagaaaaaacaaattattggtacacaatttgaaacgaccttcgctcggcaggctttcccttgtattgatgaaccggaagctaaagcaacttttgatttggcaattaaattcgacgaaaagccgggtgaaacgattttagcaaacatgccggaagtacgcgaaaaagatggcgtgcattattttgatacgacaatgcgcatgtcgacttacctgattgcgttcgcttttggggatttacaaagtaaaaaaacatcaaccaagagtggtgttgaagttagtgtatatagtactaaagcccatccaattaagcaacttgattttgccttggacattgccaaacgttcaattgagttttatgaagaattttatcaaaccccctatccgttaccgcagtccaatcagttggctttgcctgatttttcagccggggctatggaaaactggggacttgtgacttaccgtgaagcttatttgctgcttgatccagataacacagcccttaatacgaaacagcttgttgctacagtgattgcgcatgaattggcgcatcagtggtttggcgatttggttacgatgaaatggtgggatgatttgtggctaaatgaaagttttgccaatatgatggagtatgttgccgtagatgccattgagccaagctggaatatttgggaaaccttccagacttctgatgtaccatctgctttgcaacgtgatgcaaccgacggtgtacaatctgttcatgtgcaggttgaacatccggcagaaatcgatgctttattcgatggtgcaattgtttacgcgaagggcgctcgtatgttggttatggtgcgagcattgattggcgatgacgccctgcgtaagggcctgaaaaattattttgccgcacatcattacggcaacgcaacaggacatgatttatggtccgctttgggcgatgcttccggtatagatgtcagtgctgttatgaattcatggcttgaacagccaggctatccagctgtagcggctgctgttgtaaatggtaaattgactatctcgcaacagcaattcttcattggcgaaaatcaggaagcaggacgtctttggcaaattcctctgaatagtaattatgattcagtacctgctatttttgctgataagaatttaacaattggtgattattccgaattacgcaaagcagccggtgagccttttcgattgaatattggcaataattcgcatttcattgtcaaatacgataaaactttgctgtcagatattttagatgatattaattcatttgattccgtttcccaacttcaaattttgcaggacttacgtttattggcagagggtcgacaagtcctgtacgccgatatcgttcctttgttaatgcgtttttcaagtagtaggtcgatgcttgttaatgctgctctttatcgtgttgccaacaacctgaaaaagtttgtgacgccaaaatctgatgaagagaaggcgctgaaagtactctttgaaaaattgagttctaaacagtttatacgtttaggttggaagcctaaaccatctgaatcaaacgatgatcaattgactcgtccatatgttttaaatgcggcactgtatgccgagaatgacgatgcgatttcatcggcgcatgatttattcgtcgataatgctgacaaattgttgagtttgccggcaggcgtccgcgtgtatgtcttggcgaacgaaatgaaaagctttgctaatacagcactattcgataaattattaactgcttatcatgattcttcggatgccagttttaaagaagacctgcgtgtagctatcactagtgtaacggacagctctcttattgcacacttaattgaaaaattcgaggatgccgatgtgatcaaaccccaagatctgcgcggctggttctatagtcttttggccaataataatgctcagcaagcagcttgggattggattcgtaaggattgggattggttggaagatactgttggcggcgacatggagtttgcaacttatattacagttatttcgatggtttttcgtacaccggagcgtttaacagaatttaaagaattcttcgaaccgaaattgaatacacctggtttaacccgtgaaatcagtatggatatcaaggtaattgcaaaccgtgttgatttggttgaagcagaaaaaacttctgtcattgcagctattttggaagcaggtagataa

SEQ ID NO: 885 - protein, 844 aa, Oenococcus oeni PSU-1
MTEFKHFFETFQPEHYEIFLDINRENKKFSGKTTISGNAKNTKIAIHEKDLTIKSVQSDGHDLSFNIDPELDAIKIELPQTGKTSLTISYRATLTDSMMGIYPSYYEVNGEKKQIIGTQFETTFARQAFPCIDEPEAKATFDLAIKFDEKPGETILANMPEVREKDGVHYFDTTMRMSTYLIAFAFGDLQSKKTSTKSGVEVSVYSTKAHPIKQLDFALDIAKRSIEFYEEFYQTPYPLPQSNQLALPDFSAGAMENWGLVTYREAYLLLDPDNTALNTKQLVATVIAHELAHQWFGDLVTMKWWDDLWLNESFANMMEYVAVDAIEPSWNIWETFQTSDVPSALQRDATDGVQSVHVQVEHPAEIDALFDGAIVYAKGARMLVMVRALIGDDALRKGLKNYFAAHHYGNATGHDLWSALGDASGIDVSAVMNSWLEQPGYPAVAAAVVNGKLTISQQQFFIGENQEAGRLWQIPLNSNYDSVPAIFADKNLTIGDYSELRKAAGEPFRLNIGNNSHFIVKYDKTLLSDILDDINSFDSVSQLQILQDLRLLAEGRQVLYADIVPLLMRFSSSRSMLVNAALYRVANNLKKFVTPKSDEEKALKVLFEKLSSKQFIRLGWKPKPSESNDDQLTRPYVLNAALYAENDDAISSAHDLFVDNADKLLSLPAGVRVYVLANEMKSFANTALFDKLLTAYHDSSDASFKEDLRVAITSVTDSSLIAHLIEKFEDADVIKPQDLRGWFYSLLANNNAQQAAWDWIRKDWDWLEDTVGGDMEFATYITVISMVFRTPERLTEFKEFFEPKLNTPGLTREISMDIKVIANRVDLVEAEKTSVIAAILEAGR

SEQ ID NO: 886 - DNA, 2535 bp, Leuconostoc mesenteroides subsp. mesenteroides ATCC 8293
  CDS (1)..(2535): transl_table=11
atgactcaattcacacggctttataataattttcaacctgaacactatgatatctatttagatattaatcgtgagacgaaacagtttaatggtagaacaaagattagtggtaatgcactagtcaacaatattgccttacatcaaaaaaatttgcaaattcagtctgttcacattaatgaaaaagagattccttttgtcattgatgataacgctgatttgattaaaatttcgacagaaactattggtcagatagatatcactgtgacttataaggcgacgttaaccgacacaatgatggggatttatccttcgtattacgagctagatggtgttaaaaaacaaattatcggtacacaatttgaaacaagttttgctcgtcaagcttttccaagtgtggacgaaccggaagctaaagcgacatttgatttatcaatcaagtttgatgaacaaccaaatgaaacaattttagccaatatgccagagatacgcacagaaaatggcgtacattattttgatacaacagtgcggatgtcaacttatttagtggcctttgcctttggtgaattacaaagtaagcaaacggttactaacacaggggtaaaagttggtgtattttctaccaaggcacatgctcccaaagaattggattttgcactagacattgctaaacgatcgattgagtttttcgaagatttttatcagacaccttacccattaccacattcttggcaactagccttgcctgatttctctgcaggagcaatggaaaactggggattagtaacttatcgtgaagcttatgtattgcttgatcctgaaaattcagcgttgaataccaaacaaattgttgccacagttattgctcacgaattagcgcatcaatggtttggcgacttagtcacgatgaaatggtgggatgatttgtggctcaatgaaagctttgctaatatgatggagtatgtggcaattgatgccattgagcctgattggcacatttgggaaagcttccaaacaagtgatgttgtttcagcattgaagagagatagcacagatggcgtacaatcagtccacactcaagtagaacacccagctgatattgatgctttatttgatccagcaattgtttatgccaaaggggcaagactgttggtgatggttcgttctttgattggggataaggccttacgtgaaggactaaaaagatactttgctcgtcatcgctatgcaaacgcagcaggagctgatttgtgggaggctttgggtgaagcttcaggtcaaaatattaaagcagtgatggattcttggttggaacaaccaggatatccagtggtttcagcaaaagttattgatggccagttaaccatatctcaagaacagtttttcattggtgaatacgaagaaagtgaccgtcagtggcaaatacccttaaacagtaactatgatgtggcaccccaaatactatccagtaagcgtgtagtgattggtgattatgctcaattacgtgaatcagttggcacaccttttaggctgaatgacggtaatgattcgcattttgttgttaaatatgatgcccaattactaaaagatattttagaacatcttgatgaattggataatatttcgcaaagacaaattcttcaggatctacatttgctagctgatggtaggcaaattacctatgctgatatcgtgccactgctggtcaattttgcgcacaaagatgccatgttggttaatgcagtactatatagtattctttcagacttgaagaaatttgttacaccaaattcagctgaagaaaaagctttgaaggaattctatgatgtactaagtagaaaacaagtaaaacgcttgggctgggccggtcaaagcggtgaatcatacgacaatcagctcacacgtccttatgttttgaatgcttctttgtatgcagaaaatcctgatacaattgcaacggctcatgaattatttgagaaaaacagtgataatctacaaaacctatctgctgatattcgtcactttgtactcgccaatgaattgaagcactttggcaacacgtcattgtttgaacaactgttaactacttaccgaaaatcctctgatgctaattacaaagctgacttacgttcggccttaactagtaccccaaagccagatttaattgtaaaattgattgatcagctaaaggacgctgacacgattaaaccgcaagacctccgtggttgggtctatggcttgctagttaatgataaaagtcagcagttagtctgggattgggttcgtgagcagtggcagtggctagaagatacgatcggtggtgacatggaatttacgatgtatattactgttattgccattgtgttccatacaccagagcgactagctgaatttaaggcgttctttgaacctaagttgaatacgcctggattaacacgggaaattactatggacattaaagtaatctcaagccgtgttggtttaatcgcagctgaaaaggatggtgtgaataaagccatttctgaggctataaaataa

SEQ ID NO: 887 - protein, 844 aa, Leuconostoc mesenteroides subsp. mesenteroides ATCC 8293
MTQFTRLYNNFQPEHYDIYLDINRETKQFNGRTKISGNALVNNIALHQKNLQIQSVHINEKEIPFVIDDNADLIKISTETIGQIDITVTYKATLTDTMMGIYPSYYELDGVKKQIIGTQFETSFARQAFPSVDEPEAKATFDLSIKFDEQPNETILANMPEIRTENGVHYFDTTVRMSTYLVAFAFGELQSKQTVTNTGVKVGVFSTKAHAPKELDFALDIAKRSIEFFEDFYQTPYPLPHSWQLALPDFSAGAMENWGLVTYREAYVLLDPENSALNTKQIVATVIAHELAHQWFGDLVTMKWWDDLWLNESFANMMEYVAIDAIEPDWHIWESFQTSDVVSALKRDSTDGVQSVHTQVEHPADIDALFDPAIVYAKGARLLVMVRSLIGDKALREGLKRYFARHRYANAAGADLWEALGEASGQNIKAVMDSWLEQPGYPVVSAKVIDGQLTISQEQFFIGEYEESDRQWQIPLNSNYDVAPQILSSKRVVIGDYAQLRESVGTPFRLNDGNDSHFVVKYDAQLLKDILEHLDELDNISQRQILQDLHLLADGRQITYADIVPLLVNFAHKDAMLVNAVLYSILSDLKKFVTPNSAEEKALKEFYDVLSRKQVKRLGWAGQSGESYDNQLTRPYVLNASLYAENPDTIATAHELFEKNSDNLQNLSADIRHFVLANELKHFGNTSLFEQLLTTYRKSSDANYKADLRSALTSTPKPDLIVKLIDQLKDADTIKPQDLRGWVYGLLVNDKSQQLVWDWVREQWQWLEDTIGGDMEFTMYITVIAIVFHTPERLAEFKAFFEPKLNTPGLTREITMDIKVISSRVGLIAAEKDGVNKAISEAIK

SEQ ID NO: 888 - DNA, 2574 bp, Alteromonadales bacterium TW-7
  CDS (1)..(2574): transl_table=11
atgtttcttaaaagcctcttaactgtgagtgttgcgctagcaataaatgcagcaaacgctaacgaattcgttatcgaaaaactcgcaaaaccaagttcgcaaaatgtatcgctaacgctcgacccaagcaaagatacattcacagggatgactgaaattgccttagaagtattaaaaccaacacattacattgagctaaacggtgtggattatgctgtaaaaatggcgcaacttttaggtaaagaaaactgtgacttaagtaatgaaatacttaaaacaggtaaagttaaatttagctgtgatgaaaaaattcaaccaggtaaatacacacttaatattgatttttctgctccctacaaccgccaaagtgtggggttatacaaaacattggatcaaggtacaccttacctatttacccaatttgaaatgagtgatgcacgtcgtgccttccccgtttttgatgaaccaagctataaaattccttttcagttaacaataacggctccaagttcacaaaaagtatatgccaatacaccagaactaaaaacaacaataaatggtgatatgacgacccacttttttgataaaacaccgcctattccatcgtatttagttgcaatggctgttggcccgtttgaagaaatagacattgaagggatgcccattcctggtcgtgttattactcctcaaggtaaaattcatttagccgaatatgctaaagataatatgccgcgcgtacttgcagcattagaagagtattttggtattccttatgtgtataaaaaactcgactcagttgccgtgcctgaattcccatttggcgcaatggaaaactcaggcttagtaacttaccgcgaagacattttactcgttgatttagcagcagcgacacgcagtaagaaacaacgtaacgtatctattattgctcacgaactagcacaccaatggtacggtaacttggtaaccatgaagtggtggaatgacctgtggttaaacgaagcgtttgcaagctggatggcagctaaaatgaccaagcagctaaaccctgagtttgaatcacatttagacttaccacaaaataacgtaatggcactagacgcccgcttaagtactaagcctattcgtaagccaattaaaaccgaagctgatattatggacggattaggccttgcatacagtaaaggtagctcagtacttgcaatggttgaaaactggattggcgaagaggcgtttcaaaaagggattcagcgttacttaaaagacttctcttataaaaatgcagaagcggctgacttatggcaagcactaggtaaagcatcaaataaagatgtagccagtgttttaaaatcatttatcgagcagtcttctttccctcttgtgagtgttaaacagcaaggcaaaaaagtaaccatttcacaaagccgctttgtaaatgcaggtgttgatgcgccagcacaactttggaatgtgccagtaacgattaaatacggtgcaggcgacaacgttaaaacagccagtgttttactaaacaaacaaagccaaacgcttgatttagattttgcaccagagtggatttaccctgaccaaggtgctcttggctactaccgctgggtaatggatgacgcgcaatttaacgcattaattgaaaacgcgccaacagtgctgactgaccgcgaacgtttagcgctattatcggccaccgatgcactgcttaaggctggcgttatctctgccgccaagttaatgcaaacacttgaagtatttgtaagtgacagccaccctcgtgtagcaaatactgcactggactacttagtatcgcagcaacgtacgttcaaagatgaaagcaataaagacttatggcctgcatttatccgtgacgcagtgactcctgctgctaaaaaatatggtttagaggcaaaaattgacgaagatggtgcagtatcgcaacttcgtgcagccgttatatcacgcttaggctttgatggcgaagaccaaaacgtaatcaataaagccaaagaacaaacgcaagtgtatttgactaatcctcaaaaagtagacccatacttagcaggtgtttatttaagactcgcggcttttcatggtgataaagccttgcttgatcaattcatgacaacatttaaaacgactaaagacccgcaagtgcgcactaacatgctagctgctatgggcttttttggtgagtctgaattacaaaatgcagtgctggcttacagcttaactgatgaagtaaccgcctctgatatgcgtactattttatctgggcaaagttacacagaagagcgtcaagcattatttatcgattgggtttataacaattacgataaagtaacagcaagtttaccgccgttctttattcctaatttaccgtactttacaaccgtaggctgtgatgccaaaagcttagcaaccactcaaaacttctttaacgataaaatttcagaagtgcctgggtacagccgtacattgagtaaactagaagaaagtacgcttgattgtattgcactaaaaaaacgtgagcttgattcggttaatagcttcttaaacagtaaataa

SEQ ID NO: 889 - protein, 857 aa, Alteromonadales bacterium TW-7
MFLKSLLTVSVALAINAANANEFVIEKLAKPSSQNVSLTLDPSKDTFTGMTEIALEVLKPTHYIELNGVDYAVKMAQLLGKENCDLSNEILKTGKVKFSCDEKIQPGKYTLNIDFSAPYNRQSVGLYKTLDQGTPYLFTQFEMSDARRAFPVFDEPSYKIPFQLTITAPSSQKVYANTPELKTTINGDMTTHFFDKTPPIPSYLVAMAVGPFEEIDIEGMPIPGRVITPQGKIHLAEYAKDNMPRVLAALEEYFGIPYVYKKLDSVAVPEFPFGAMENSGLVTYREDILLVDLAAATRSKKQRNVSIIAHELAHQWYGNLVTMKWWNDLWLNEAFASWMAAKMTKQLNPEFESHLDLPQNNVMALDARLSTKPIRKPIKTEADIMDGLGLAYSKGSSVLAMVENWIGEEAFQKGIQRYLKDFSYKNAEAADLWQALGKASNKDVASVLKSFIEQSSFPLVSVKQQGKKVTISQSRFVNAGVDAPAQLWNVPVTIKYGAGDNVKTASVLLNKQSQTLDLDFAPEWIYPDQGALGYYRWVMDDAQFNALIENAPTVLTDRERLALLSATDALLKAGVISAAKLMQTLEVFVSDSHPRVANTALDYLVSQQRTFKDESNKDLWPAFIRDAVTPAAKKYGLEAKIDEDGAVSQLRAAVISRLGFDGEDQNVINKAKEQTQVYLTNPQKVDPYLAGVYLRLAAFHGDKALLDQFMTTFKTTKDPQVRTNMLAAMGFFGESELQNAVLAYSLTDEVTASDMRTILSGQSYTEERQALFIDWVYNNYDKVTASLPPFFIPNLPYFTTVGCDAKSLATTQNFFNDKISEVPGYSRTLSKLEESTLDCIALKKRELDSVNSFLNSK

SEQ ID NO: 890 - DNA, 5035 bp, Lactobacillus helveticus
  CDS (2291)..(4825): transl_table=11
gagctcggcgattaaatcgggaatgggataatcctacaaagaacctgcaaaatcttctttgtgattcaatccctaattccgcttgctagataagcatagctaagatggaactatcagatagcttgatctgatctgtatttctgcgatgcttaagggagttcggagcatacagcttataccaagaacgacaaatattgtttaaacgagtaaaactaacttgtaaatgatgagaaaaatgcttaagcttaagatagttcaatctagtcagactcttttctattattactatttacaagtcgagtttaacaagattggactttttatttaactaaaacgatttaactagcaccacgcgtgtaatttagaataattacccaaatcagaaataaacagtgagataaagggcattgtcattgagaagcccatcccggtaatgaaacaacctagccacagggtataaaaagctttgtgccaccccgcaggcagattgcgtgatttaatagcagtcaaattgtcatctctttcaaaaaaaataagaatggtttttaacatccattttagcacatacaaaaaactaaatatttttccaattttttacaatagaaaaactattaaccaaaaaatgtgctacgataatggttctagaagggagttattctttatggcacatatgtcacggcgagaatatcgcatgaagaaggaacatggacaaggcgttgcagatcaatcacgagttaattatgctaaaaataaggcaaatagtcgtgaagaatttagaagcaaaaaaattagcaaccctaaacctgctgctaataccaaaattgatctttcacgagaaaattataatcacgtaaagcttaacttttggacaatcttttctgatcgaccatacatctcagttgcaattattgttctagcactatttcttgccatgattaaattatggtggggattattaatcttactgttagtagtaattgtcggaatatatgtcattggccacagtcaccaccctcatcaggtgcttagtcttgagtttcatttaaaggcctcaagaaaattaagcatgttaagagctttagagttaggtggctcagttaccatgtttttggctacctatatgaaacaggtggttattgttgatttctcatcagcaggttcaactgatagtttccaaattatccaaggagccttatccaataatggtggttactatggtcagcaaggatcgtatttcttgagtttgttaaatacagttactggcggtcagctttggagttcatatcgttatgctacaaatagtgcgcaaatgatggatagcaactcagggcgctggattattatgtggatcatgcttttgatgattgccccagctttttgtgtattggcacaattctttaaagaaccatattctagaaatgtgactttgattacttcattgattaccacatttagttttatcttaactcctgttttaatgcgtaaatgggtagttggttatgctatggaaaaccaaatgacgagagaagcagcgaataatgctgttcacattgggacgatggcctacgttggaatggcttgctcgatcctagtattaataattgcaacctatcgggtaattaaacaagacaagtttgaataaagaaaaaacagcttagtcaacttgactaggctgtttttttggaaattaaggaataaattaattttagtaccagttatgtgctaaccaaaatctcatagcgttaacccatgaaccgtaacgaccataaacgtatctgtcagcagtacgttcttggttctttggtgataagtcaccgtgtaagtaaccgatgcttaattggtacttaccgtaacatgaaccgtttctagcggtgtagctaccacctgattcacgcattgcgatccatctcttagctgccttttctttattagacatcttcttagcagcttgaacagtttgactggtagaattgttagcaaaagtttgtgcaactgcgacacacgcaaaggcaagtgctaatgcagctactaatttaacaaaaatagatttaacttgtttactcattgatttcattccttattaaaacttactttccttattaaaacttacttttaaaaaatttatatagttcttaatgactatgcttatatattacaagatctatatgacagcaatgttacaaaacggaaacggcactcttacaatcagaaagaaattgccttttttaagcacttttaccgatattttggtaaaatttagaatgaattatgctaattaggaggcaaatatatggcagttaaacgtttctataaaactttccacccagaacattacgatttgcgtattaatgtaaaccgtaagaataaaactattaatggtacttccacaattactggtgatgtaattgaaaatccagtatttattaaccaaaaatttatgaccattgatagcgttaaggttgatggtaaaaatgttgattttgatgtaatcgaaaaagatgaagcaatcaaaattaaaacaggagtaactggcaaagctgtaatcgaaattgcttatagcgcaccacttactgatactatgatgggtatttatccttcatattacgaattagaaggtaagaagaagcaaatcatcggtacgcaattcgaaactacttttgctcgccaagcattcccatgtgtggacgaacctgaagctaaagctacattctcacttgctcttaagtgggatgaacaagatggtgaagttgcacttgctaacatgccagaagtagaagttgacaaggatggctaccaccactttgaagaaactgtccgcatgtctagttacttagttgcctttgcctttggtgaattacaatctaagactactcatactaaggatggcgtattaattggcgtttacgcaactaaggcacacaagcctaaggaattagacttcgctttggacattgctaagcgcgcaattgaattttacgaagaattctaccaaaccaaatacccacttccacagtcattgcaacttgcattgccagacttctcagctggtgccatggaaaactggggtcttgtaacttaccgtgaagcatacttgctccttgacccagacaatactagcttggaaatgaagaagttagttgccacagttattacccatgaattggctcaccaatggttcggtgacttggtaaccatgaagtggtgggacaacttatggcttaacgaaagttttgccaacatgatggaatacttatcagttgatggtttggaacctgactggcacatctgggaaatgttccaaactagtgaagctgcatctgcattgaacagagatgctactgatggtgttcaaccaattcaaatggaaattaatgacccagcagatattgactcagcctttgacggtgccattgtttatgctaagggttcaagaatgttagtcatggttcgttcacttcttggtgacgacgcacttcgcaaaggtcttaagtactacttcgaccaccacaagtttggcaatgccactggtgatgacctttgggatgcactttcaactgcaactgatcttgatattggtaaaatcatgcactcatggcttaagcaacctggttacccagtagttaatgccttcgttgctgaagatggtcatttgaagcttacgcaaaagcaattcttcattggtgaaggtgaagataagggtagacaatggcaaattccattgaatgctaacttcgacgcacctaagattatgtctgataaggaaattgacttaggcaattacaagatacttcgcgaagaagcaggtcacccacttagacttaatgttggcaacaactcacacttcatcgttgaatatgacaagactttgcttgatgatattttgtcagatgttaatgaattggatccaattgataagttacaattgcttcaagacttacgtctcttagcagaaggtaagcaaatttcttacgcttcaattgttccacttttggttaaattcgctgattctaagtcaagcttggtaattaacgcactttacactactgcagctaagcttcgtcaattcgttgaaccagaatcaaatgaagaaaagaacttgaagaagctttatgatctcttatcaaaggatcaagttgcacgtttaggctgggaagtaaagccaggcgaaagcgatgaagatgttcaaattcgtccatacgagttgagcgcaagtctttacgctgaaaatgcggactcaattaaggcagctcaccaaatctttactgaaaatgaagataacttggaagcattgaatgcagatattcgtccatacgttttaatcaatgaagttaagaactttggcaatgctgaattagttgataagttaattaaggaataccaaagaacagctgacccatcatacaaggttgacttacgcagcgctgtaaccagcaccaaggatcttgcagctatcaaggctattgttggcgactttgaaaatgctgacgtagttaagccacaagatttatgtgattggtaccgtggtttacttgctaaccattatggtcaacaagcagcttgggactggatcagagaagactgggattggcttgacaagactattggtggtgacatggaatttgctaaatttatcactgttactgcaggcgtcttccataccccagaaagacttaaggaattcaaggaattctttgaaccaaagattaatgttccacttcttagtcgtgaaattaagatggacgttaaggtcatcgaaagcaaggttaacttgatcgaagctgaaaaagatgctgttaatgatgcagttgctaaagcaattgattaagtaatataaagtaataaaaataaggatctatctgtaaataggataggtccttatttttcgtggtgtaattgtttttattgcttaccttagataagaagagagtttttctttgggtaaacgagattcaaatacagcattctttggacagccaaagggcttgtccactttattcttcactgaaatgtgggagcgtttcagtacacagcatgc

SEQ ID NO: 891 - protein, 844 aa, Lactobacillus helveticus
MAVKRFYKTFHPEHYDLRINVNRKNKTINGTSTITGDVIENPVFINQKFMTIDSVKVDGKNVDFDVIEKDEAIKIKTGVTGKAVIEIAYSAPLTDTMMGIYPSYYELEGKKKQIIGTQFETTFARQAFPCVDEPEAKATFSLALKWDEQDGEVALANMPEVEVDKDGYHHFEETVRMSSYLVAFAFGELQSKTTHTKDGVLIGVYATKAHKPKELDFALDIAKRAIEFYEEFYQTKYPLPQSLQLALPDFSAGAMENWGLVTYREAYLLLDPDNTSLEMKKLVATVITHELAHQWFGDLVTMKWWDNLWLNESFANMMEYLSVDGLEPDWHIWEMFQTSEAASALNRDATDGVQPIQMEINDPADIDSAFDGAIVYAKGSRMLVMVRSLLGDDALRKGLKYYFDHHKFGNATGDDLWDALSTATDLDIGKIMHSWLKQPGYPVVNAFVAEDGHLKLTQKQFFIGEGEDKGRQWQIPLNANFDAPKIMSDKEIDLGNYKILREEAGHPLRLNVGNNSHFIVEYDKTLLDDILSDVNELDPIDKLQLLQDLRLLAEGKQISYASIVPLLVKFADSKSSLVINALYTTAAKLRQFVEPESNEEKNLKKLYDLLSKDQVARLGWEVKPGESDEDVQIRPYELSASLYAENADSIKAAHQIFTENEDNLEALNADIRPYVLINEVKNFGNAELVDKLIKEYQRTADPSYKVDLRSAVTSTKDLAAIKAIVGDFENADVVKPQDLCDWYRGLLANHYGQQAAWDWIREDWDWLDKTIGGDMEFAKFITVTAGVFHTPERLKEFKEFFEPKINVPLLSREIKMDVKVIESKVNLIEAEKDAVNDAVAKAID

SEQ ID NO: 892 - DNA, 2532 bp, Lactobacillus reuteri
  CDS (1)..(2532): transl_table=11
atggcaaaactcgaacgcttttataatactttccaacctgaccattatgatgtttttatcgatattaatcgagcaaagaaaactattaatggaaaaacaactatcactggtaacgcgactgatcctcaaattgcaattaatcaaaaaaatttgcaggtcactggtgttcaagcagacggtcaagaattagactttaatattgataatgatgccgaggcagttcggattacccttccgcaaactggtaaagtaacttttactgtaacttataatactaagttaactgattcgatgatgggaatttatccatcatactatgaggttgacggggagaaaaagcaaattatcgggactcaatttgaaacaacttttgctcggcaagcttttccctgtgtcgatgaaccagaggctaaggctaccttcagtctagcaattaaatttgatgagcattctggtgaaaccattatcgctaatatgccagaagatcacgttgaaaatggcatccactactttgaacccactgtgcgaatgtccacttatcttgttgcctttgcatttggagagctccaaagtaaaattactgaaacaaaaggtggcgttaaagtaggtgtattcgcaacgaaagcgcaccaaccaaaagaacttgattttgcattagatattgctaagcgggcaatcgaattttatgaggatttctatcaaactccgtaccctcttccccattcatggcagttagctttacctgatttctctgccggtgcaatggaaaattggggattagtaacctaccgggaagcttacttattactcgatccagacaacacttcccttgaaatgaaacaattagttgcaactgtcatcacacacgaactagctcaccagtggtttggtgatcttgtgacaatgaagtggtgggatgacttatggcttaatgaaagttttgctaatatgatggagtatgttgccgtggatgttctccagcctgactggcatatttgggaacttttccaaacttcagaagctccaatggcattacaacgagatgcaactgatggtgttcaatccgttcatgttgatgttaacaatccggccgaaattgatgccttattcgatggtgcgattgtttatgccaaaggatcgcgaatgttagtaatggtccgggctcttttaggtgacaaagcgttacgagaaggtcttaagaattattttgctgctcacaaatacagtaatgcaaccggagctgacttatggaaagcccttggcgacgcatcgggacttaacattggaaaaatcatgaattcatggcttgaacaaccaggctatcctgttgtaacagcaaaaattaatgatgatggcgatttagtattgtcacaaaagcaatttttcattggtgatggtaaagatgttgatcgtcaatggcaaatcccacttaatagcaactatgatgaagctccacaaattatggcggaacaagaactcaaccttggaaattatcaagcattgcgcgataagaatggtcaaccattccgtctaaacctcggcaataattcacatttcatcgtaaaatatgatgatacgctactaaacgatattttagatcacgctgatgaattagacccgattacccaacgtcaacttcttcaggatctgcggttacttgcccaaggacaacaaatatcttatgcgtcattaattccattattaaagcaatttaaagatggtccttcagcaattgttaacgccgaactataccaaatagctaatggccttaaaatgtttgctaaacctgattctcctgctgaacaagaactacaacaattctttgatctattaagtaaggatcaagtaaagcgggttggttggttgcctaaacatgatgaaagcaatgatgacccattgacgcgcccttatattcttagcacttcactatttgcacgcaataatgattcaattactcaagctcatcacatctttactgaaaatcaggataaattagagtctctttcggcggatattcgtggtttagttcttaaaaatgaagttcaaaacttcgggagtgctgaattatttgataaattaatcaaagcttaccaacaaacagcggacgcaagctttaaacaagacttgcgaatggcaataccaaatacaactgatccagcattaattgcaaaagttgttagttactttgaagatgctgacgtcattaagccacaagatttacgagcatggtatcgtggccttcttgccaataaagcaggtcaacaagctgcctggaattggcttcgtgatgaatggcaatggttaaatgacacagttggtggcgatatggaatttgctacctttatcactgtcactgccggcgttttccatactcctgaacgattgaacgaatttaaagacttctttgaacctaaacttaatacaccaggtttaacccgggaaattaaaatggacattagtgtaattgaaagcaaagtcaatttaattaacaaagagcaaacagctgttaatgatgcaattgcgcaacaataa

SEQ ID NO: 893 - protein, 843 aa, Lactobacillus reuteri
MAKLERFYNTFQPDHYDVFIDINRAKKTINGKTTITGNATDPQIAINQKNLQVTGVQADGQELDFNIDNDAEAVRITLPQTGKVTFTVTYNTKLTDSMMGIYPSYYEVDGEKKQIIGTQFETTFARQAFPCVDEPEAKATFSLAIKFDEHSGETIIANMPEDHVENGIHYFEPTVRMSTYLVAFAFGELQSKITETKGGVKVGVFATKAHQPKELDFALDIAKRAIEFYEDFYQTPYPLPHSWQLALPDFSAGAMENWGLVTYREAYLLLDPDNTSLEMKQLVATVITHELAHQWFGDLVTMKWWDDLWLNESFANMMEYVAVDVLQPDWHIWELFQTSEAPMALQRDATDGVQSVHVDVNNPAEIDALFDGAIVYAKGSRMLVMVRALLGDKALREGLKNYFAAHKYSNATGADLWKALGDASGLNIGKIMNSWLEQPGYPVVTAKINDDGDLVLSQKQFFIGDGKDVDRQWQIPLNSNYDEAPQIMAEQELNLGNYQALRDKNGQPFRLNLGNNSHFIVKYDDTLLNDILDHADELDPITQRQLLQDLRLLAQGQQISYASLIPLLKQFKDGPSAIVNAELYQIANGLKMFAKPDSPAEQELQQFFDLLSKDQVKRVGWLPKHDESNDDPLTRPYILSTSLFARNNDSITQAHHIFTENQDKLESLSADIRGLVLKNEVQNFGSAELFDKLIKAYQQTADASFKQDLRMAIPNTTDPALIAKVVSYFEDADVIKPQDLRAWYRGLLANKAGQQAAWNWLRDEWQWLNDTVGGDMEFATFITVTAGVFHTPERLNEFKDFFEPKLNTPGLTREIKMDISVIESKVNLINKEQTAVNDAIAQQ

SEQ ID NO: 894 - DNA, 2640 bp, Encephalitozoon hellem
  CDS (1)..(2598)
atgaagtggattgaattgatgattggattgatgcccatgattgaaggcagaaaaatggaaggaagcagtgggacagaatttcctcgaaggctggacaggactgttgttccttcgcactacgacctgcatgtgaaggtgatggacacggggttctgcggaaacgtagggatccgggtggatatctcgcagcctgtggatgagataatgatgaatgcaaaggagcttgacgtactgagtgcagggattgagattgatggaaggaggattgatggagaggtggtcatgggagacgacgagaaggagtacgaggttgtaaggatcaggtttccctcgacgatacccaagggagaaggatacattgtgggagagttctgcggagactacaactctggtctggttgggttttacaagagcgggggagagtcgaaggtctacagcacacactttgagccgacggatgcaagaagggtgtttccatgctttgaccagcccgatatgaaggcaacgtttagcatttcgattgatgcgccgtcaaaccttgttgttctgtcgaacagcccctctgtgccttcgctgcggaaggagtatggagacagggcgattgagtacttcacgaagacaagcaagatgtctacatatcttgttgcatttgttgctggcgagcttgagtacattgaggactggagcaagtctggagtgaggctaagggtgtatggacaggggaaggaagaggcgtcgtggggaaggtatgggcttgaggttgcaaagagatgcatcgactactttgaggagtactttgggattgagtatgagtttcctgagaaggggatggcaaagatagacatgattgggattccgagctttggcagtggagcgatggagaactgggggctcattacgttccgaaaggagagtcttctgtactctgatggaaaggacagtgttgagcaaaagaagaatgtagctgaaactgtgtgccacgagctggggcacatgtggtttggaaaccttgtgacgatggagtggtgggacgacctgtggctgaacgagggatttgcaacatggatatcgttcaaggggatgtctgagatagggaaggagtatgttgactgggatgtcgagggagagtttgtgctgtggaatgtgatacgggggatgcttgaggatgggcttggaaagagccacaagatccggatggaggtttccgatcctggagagattggagagatctttgatgcgatcagctacagcaaaggagcaagcatcatcaggatggttgagaagtatgttggggagtctgtatttatgtctgggatccggcgatacatcaaggagcacatgtatgggaacgggaatggaatgagcctgtggaaggcgattggggagtcctatggaaaggacatttcgtcgatggttgagggatggatttcgcaggcaggataccctgtgataagtgtcagcgagagtggggagaacctcgttctgtcgcagaggagatactcgatgcttggaaaaagcgacgacagcatgtggattgtgcctgttgtgataacatgggggtctggagagaacgaaagcattgaggttggagagagagaggttgtgattccacggagaagcgatgtgtacaaggtgaacagctcgtatgcagggttctaccgggtgctgtacgaggccgatgcactgagaaggcttgaggagaggcttgaggagatgggcgacatggaccgagtgaacatggtcgaggatgtgtttgggcttggatttggactgtatggagggattggagagaggctccggaagataggggagtactactctgacggatactgtgttgcccgaagcacggttgagaagctgatgcggatccggagtgtgttctacgacgatgccgagattgtgtctgcggttgacaagcgagttctgaggctgattgaggagaggattgagtctattgacacctctgtgtgtgagacgtctgtggaaaggatcagcatgaacaagtacctgctgtctgttggcattgaggttggaagtgcctctgcgatgaggaaggtgtctgagctgtggaggcggcacgtcgaggagggagcggagcttggagaacttcggtggattgtgtacaagggagttgttgacgacaaccttgagcacctgattggggagtacaagagtggaaggaggcctggaacccgatgggaagtgataagtgggttcagcgggataaagaggaaggagagctttgcggaggttgtgaagaggctgtgcgagttcagtgttgaggacattggtgtggtgatagcaataatctgcagaagcgggaacttccgtgacgagatggttgagtatgttgtgtcgcaccgggaggagctttattcgatggtgcagaagaatgtgatgctatacaacaccattgtgatgtctctccggcatgtgagcagtgacccaatggtggagaaagtgtccgagttcctttctgggatcaagcactctggaagcagtctgagcattgagaaggtgcgagacgagattgagtggagaagaaggatgagaggagtaagagacgagatccttgcaggactctgctcctctgagtgaataaacagggttctctgtaaaaaaaaaaaaaaaaaaaaaaaa

SEQ ID NO: 895 - protein, 865 aa, Encephalitozoon hellem
MKWIELMIGLMPMIEGRKMEGSSGTEFPRRLDRTVVPSHYDLHVKVMDTGFCGNVGIRVDISQPVDEIMMNAKELDVLSAGIEIDGRRIDGEVVMGDDEKEYEVVRIRFPSTIPKGEGYIVGEFCGDYNSGLVGFYKSGGESKVYSTHFEPTDARRVFPCFDQPDMKATFSISIDAPSNLVVLSNSPSVPSLRKEYGDRAIEYFTKTSKMSTYLVAFVAGELEYIEDWSKSGVRLRVYGQGKEEASWGRYGLEVAKRCIDYFEEYFGIEYEFPEKGMAKIDMIGIPSFGSGAMENWGLITFRKESLLYSDGKDSVEQKKNVAETVCHELGHMWFGNLVTMEWWDDLWLNEGFATWISFKGMSEIGKEYVDWDVEGEFVLWNVIRGMLEDGLGKSHKIRMEVSDPGEIGEIFDAISYSKGASIIRMVEKYVGESVFMSGIRRYIKEHMYGNGNGMSLWKAIGESYGKDISSMVEGWISQAGYPVISVSESGENLVLSQRRYSMLGKSDDSMWIVPVVITWGSGENESIEVGEREVVIPRRSDVYKVNSSYAGFYRVLYEADALRRLEERLEEMGDMDRVNMVEDVFGLGFGLYGGIGERLRKIGEYYSDGYCVARSTVEKLMRIRSVFYDDAEIVSAVDKRVLRLIEERIESIDTSVCETSVERISMNKYLLSVGIEVGSASAMRKVSELWRRHVEEGAELGELRWIVYKGVVDDNLEHLIGEYKSGRRPGTRWEVISGFSGIKRKESFAEVVKRLCEFSVEDIGVVIAIICRSGNFRDEMVEYVVSHREELYSMVQKNVMLYNTIVMSLRHVSSDPMVEKVSEFLSGIKHSGSSLSIEKVRDEIEWRRRMRGVRDEILAGLCSSE

SEQ ID NO: 896 - DNA, 2910 bp, Streptococcus thermophilus
  CDS (194)..(2737): transl_table=11
atgcccgtatctttgtgatgggttgtctacctcaagtctggaaaaatcattgaattataggcaaagtttaaaatctatgttataatgagcctgtattgaataattcaggctcatttcttttgttaaagtacctgatatcgaaacaaatatcggtctgtttcgatacgaaaagttagattaggagtatttacatatgacagcatctgttgctcgttttatcgaaagtttcatccctgaaaattacaatcttttcttggacattaatcgttctgaaaagacctttacagggaatgttgccattactggtgaagccattgataatcacatctctcttcaccaaaaagaccttaccattaattcagttctcttggataatgaatccttgaacttccaaatggatgatgccaatgaggcttttcatattgaacttccagaaactggggttctaacaattttcatagaattttctggccgcatcacagataatatgactggtatttatccatcatattacacttacaatggtgaaaagaaggaaattatttcaacacagtttgaatctcatttcgcccgtgaagcttttccttgtgttgatgaaccagaagcaaaagcaacttttgatctttcattgaaatttgacgctgaagagggcgatactgccttgtcaaatatgccagaaatcaatagccatttgcgtgaagaaactggagtttggacattcgagacaacacctcgcatgtctacataccttctcgcctttggtttcggtgctcttcatggtaaaacagctaaaacaaaaaacggcactgaagttggtgtcttcgctacagttgcacaagcagaaaatagcgtcgacttcgctcttgatattgccgttcgtgtcatcgaattctatgaagactacttccaagtcaagtatcctattccattatcataccaccttgctcttcctgacctttcagcgggtgccatggaaaactggggtcttgttacctatcgtgaagtttacctccttgtagatgaaaatagctcagctgcaagccgtcaacaagttgcccttgttgttgctcacgaattggctcaccaatggttcggtaaccttgttaccatgaaatggtgggatgatttatggcttaacgaaagtttcgccaacatgatggagtatgtttcagtaaatgctattgaaccaagctggaacatctttgaaggatttccaaacaaactgggtgtacctaatgctcttcaacgtgacgcaacagacggcgtacagtctgtccacatggaagtcaatcatccagacgagattaacaccctctttgatagtgctattgtttatgccaagggtagccgtcttatgcatatgctccgccgttggttaggcgatgaagcctttgccaaagggcttaaagcttactttgaaaaacaccaatataacaatactgttggacgtgacctttggaatgctctttcagaggcttcaggtaaggatgtctctagcttcatggacacatggttagagcaaccaggatacccagtggttagtgcagaagttgttgatgatacgcttatccttagtcaaaaacaattcttcattggtgaacatgaagacaaagggcgcctttgggagattccattgaatacaaactggaatgggcttccagatacactttcagaagagcgtattgagattccaaattatagccagcttgctactgaaaataatggagttctccgtcttaatacagctaatacagcacattacatcacagactatcaaggacaactcttggacaatatcttagaagattttgcaaaccttgatactgtaagtaaacttcaaatcttacaagaacgccgtcttctagcggaaagtggacgtatctcgtatgcaagcctagttggtcttcttgatcttgtcgaaaaagaagaaagcttcttgatttctcaagctaaatctcaaatccttgctggtttgaaacgctttatcgatgaagatacagaagccgaagtgcattataaagccttggtaagtcgtcaattccaaaatgactttgaacgccttggtttcgatgccaaagaaggggagtctgatgaagatgaaatggtccgtcaaacagctcttagctacttgattgaagcagactatcaaccaacagtccttgcagccgcaaatgttttccaagcccataaagaaaacatagaaagcattccagcaagtatccgtggccttgtcctcatcaaccaaatgaaacaagaaaacagtctttctcttgttgaagagtatattaatgcatacgtggcaacaaacgacagtaacttccgtcgtcaattgacccaagcactttcatatcttaaaaatcaagaaggtcttgactacgtactaggtcagctaaaagataaaaacgttgttaaaccgcaagatttgtatctctggtatatgaacttcctcagcaaatcttttgctcaagagaccgtttgggactgggctaaagaaaactgggaatggattaaagcagctcttggtggcgatatgagctttgatagttttgttaatatcccagcaggaatctttaaaaatcaagaacgtcttgaccaatatattgcatttttcgagccacaaacaagtgacaaagctttggaacgtaatattttgatgggaattaaaacaattgctgcacgcgtagacttaattgaaaaagaaaaagctgcggttgaatcagctcttaaagattattaatataaaaaacaagctttccatgaaggagagtttgtttttattcacaatgatttacataattttagttctgctaacaatcgtaaataaaattagcatcacataattaaatttatgtataataaaaataatcaacctaaatcggaatggttttgattggttaattataaattatc

SEQ ID NO: 897 - protein, 847 aa, Streptococcus thermophilus
MTASVARFIESFIPENYNLFLDINRSEKTFTGNVAITGEAIDNHISLHQKDLTINSVLLDNESLNFQMDDANEAFHIELPETGVLTIFIEFSGRITDNMTGIYPSYYTYNGEKKEIISTQFESHFAREAFPCVDEPEAKATFDLSLKFDAEEGDTALSNMPEINSHLREETGVWTFETTPRMSTYLLAFGFGALHGKTAKTKNGTEVGVFATVAQAENSVDFALDIAVRVIEFYEDYFQVKYPIPLSYHLALPDLSAGAMENWGLVTYREVYLLVDENSSAASRQQVALVVAHELAHQWFGNLVTMKWWDDLWLNESFANMMEYVSVNAIEPSWNIFEGFPNKLGVPNALQRDATDGVQSVHMEVNHPDEINTLFDSAIVYAKGSRLMHMLRRWLGDEAFAKGLKAYFEKHQYNNTVGRDLWNALSEASGKDVSSFMDTWLEQPGYPVVSAEVVDDTLILSQKQFFIGEHEDKGRLWEIPLNTNWNGLPDTLSEERIEIPNYSQLATENNGVLRLNTANTAHYITDYQGQLLDNILEDFANLDTVSKLQILQERRLLAESGRISYASLVGLLDLVEKEESFLISQAKSQILAGLKRFIDEDTEAEVHYKALVSRQFQNDFERLGFDAKEGESDEDEMVRQTALSYLIEADYQPTVLAAANVFQAHKENIESIPASIRGLVLINQMKQENSLSLVEEYINAYVATNDSNFRRQLTQALSYLKNQEGLDYVLGQLKDKNVVKPQDLYLWYMNFLSKSFAQETVWDWAKENWEWIKAALGGDMSFDSFVNIPAGIFKNQERLDQYIAFFEPQTSDKALERNILMGIKTIAARVDLIEKEKAAVESALKDY

SEQ ID NO: 898 - DNA, 3796 bp, Lactobacillus helveticus
  CDS (881)..(3415): transl_table=11
tcggtacccggggatcctctagaaatgtgactttgattacttcattgattaccacatttagttttatcttaactcctgttttaatgcgtaaatgggtagttggttatgctatgggaaaaccaaaattggcgagagaagcagcgaataatgctgttcacattgggacgatggcctacgttggaatggcttgctcgatcctagtattaataattgcaacctatcgggtaattaaacaagacaagtttgaataaagaaaaaacagcttagtcaacttgactaggctgtttttttggaaattaaggaataaattaattttagtaccagttatgtgctaaccaaaatctcatagctttaacccatgaaccgtaacgaccataaacgtatctgtcagcagtacgttcttggttctttggtgataagtcaccgtgtaagtaaccgatgcttaattggtacttaccgtaacatgaaccgtttctagcggtgtagctaccacctgattcacgcattgcgatccatctcttagctgccttttctttattagacatcttcttagcagcttgaacagtttgactggtagaattgttagcaaaagtttgtgcaactgcgacacacgcaaaggcaagtgctaatgcagctactaatttaacaaaaatagatttaacttgtttactcattgatttcattccttattaaaacttacttttaaaaaatttatatagttcttaatgactatgcttatatattacaagatctatatgacagcaatgttacaaaacggaaacggcactcttacaatcagaaagaaattgccttttttaagcacttttaccgatattttggtaaaatttagaatgaattatgctaattaggaggcaaatatatggcagttaaacgtttctataaaactttccacccagaacattacgatttgcgtattaatgtaaaccgtaagaataaaactattaatggtacttccacaattactggtgatgtatttgaaaatccagtacttattaaccaaaaatttatgaccattgatagcgttaaggttgatggtaaaaatgttgattttgatgtaatcgaaaaagatgaagcaatcaaaattaaaacaggagtaactggcaaagctgtaatcgaaattgcttatagcgcaccacttactgatactatgatgggtatttatccttcatattacgaattagaaggtaagaagaagcaaatcatcggtacgcaattcgaaactacttttgctcgccaagcattcccatgtgtggacgaacctgaagctaaagctacattctcacttgctcttaagtgggatgaacaagatggtgaagttgcacttgctaatatgccagaagtagaagttgacaaggatggctaccaccactttgaagaaactgtccgcatgtctagttacttagttgcctttgcctttggtgaattacaatctaagactactcatactaaggatggcgtattaattggcgtttacgcaactaaggcacacaagcctaaggaattagacttcgctttggacattgctaagcgcgcaattgaattttacgaagaattctaccaaaccaaatacccacttccacagtcattgcaacttgcattgccagacttctcagctggtgccatggaaaactggggtcttgtaacttaccgtgaagcatacttgctccttgacccagacaatactagcttggaaatgaagaagttagttgccacagttattacccatgaattggctcaccaatggttcggtgacttggtaaccatgaagtggtgggacaacttatggcttaacgaaagttttgccaacatgatggaatacttatcagttgatggtttggaacctgactggcacatctgggaaatgttccaaactagtgaagcttcatctgcattgaacagagatgctactgatggtgttcaaccaattcaaatggaaattaatgacccagcagatattgactcagtctttgacagtgccattgtttatgctaagggttcaagaatgttagtcatggttcgttcacttcttggtgacgacgcacttcgcaagggtcttaagtactacttcgaccaccataagtttggcaatgccactggtgatgacctttgggatgcactttcaactgcaactgatcttgatattggtaaaatcatgcactcatggcttaagcaacctggttacccagtagttaatgccttcgttgctgaagatggtcatttgaagcttacgcaaaagcaattcttcattggtgaaggtgaagataagggtagacaatggcaaattccattgaatgctaacttcgacgcacctaagattatgtctgataaggaaattgacttaggcagttacaaggtacttcgcgaagaagcaggtcacccacttagacttaatgttggcaacaactcacacttcatcgttgaatatgacaagactttgcatgatgatattttgtcagatgttaatgaattggatccaattgataagttacaattgcttcaagacttacgtctcttagcagaaggtaagcaaatttcttacgcttcaattgttccacttttggttaaattcgctgattctaagtcaagcttggtaattaacgcactttacactactgcagctaagcttcgtcaattcgttgaaccagaatcaaatgaagaaaagaacttgaagaagctttatgatctcttatcaaaggatcaagttgcacgtttaggctgggaagtaaagccaggcgaaagcgatgaagatgttcaaattcgtccatacgagttgagtgcaagtctttacgctgaaaatgcggactcaattaaggcagctcaccaaatctttactgaaaatgaagataacttggaagcattgaatgcagatattcgtccatacgttttaatcaatgaagttaagaactttggcaatgctgaattagttgataagttaattaaggaataccaaagaacagctgacccatcatacaaggttgacttacgcagcgctgtaaccagcaccaaggatcttgcagctatcaaggctattgttggcgactttgaaaatgctgacgtagttaagccacaagatttatgtgattggtaccgtggtttacttgctaaccattatggtcaacaagcagcttgggactggatcagagaagactgggattggcttgacaagactgttggtggtgacatggaatttgctaaatttatcactgttactgcaggcgtcttccataccccagaaagacttaaggaattcaaagaattctttgaaccaaagattaatgttccacttcttagtcgtgaaattaagatggacgttaaggtcatcgaaagcaaggttaacttgatcgaagctgaaaaagatgctgttaatgatgcagttgctaaagcaattgattaagtaatataaagtaataaaaataaggatctatctgtaaataggataggtccttatttttcgtggtgtaattgtttttattgcttaccttagataagaaaggagtttttctttgggtaaacgagattcaaatacagcattctttggacagccaaagggcttgtccactttattcttcactgaaatgtgggagcgtttcagttactacggcatgcgggctatcttattattctacatgtattacgcagttaccaaaggtggtttggggatgtctcaaactactgctgcttcaatcatgtcgatctatggttcgcttgtttatttatcaacactagttggaggctggctttctgacagagtatggggctctagagtcgacctgca

SEQ ID NO: 899 - protein, 844 aa, Lactobacillus helveticus
MAVKRFYKTFHPEHYDLRINVNRKNKTINGTSTITGDVFENPVLINQKFMTIDSVKVDGKNVDFDVIEKDEAIKIKTGVTGKAVIEIAYSAPLTDTMMGIYPSYYELEGKKKQIIGTQFETTFARQAFPCVDEPEAKATFSLALKWDEQDGEVALANMPEVEVDKDGYHHFEETVRMSSYLVAFAFGELQSKTTHTKDGVLIGVYATKAHKPKELDFALDIAKRAIEFYEEFYQTKYPLPQSLQLALPDFSAGAMENWGLVTYREAYLLLDPDNTSLEMKKLVATVITHELAHQWFGDLVTMKWWDNLWLNESFANMMEYLSVDGLEPDWHIWEMFQTSEASSALNRDATDGVQPIQMEINDPADIDSVFDSAIVYAKGSRMLVMVRSLLGDDALRKGLKYYFDHHKFGNATGDDLWDALSTATDLDIGKIMHSWLKQPGYPVVNAFVAEDGHLKLTQKQFFIGEGEDKGRQWQIPLNANFDAPKIMSDKEIDLGSYKVLREEAGHPLRLNVGNNSHFIVEYDKTLHDDILSDVNELDPIDKLQLLQDLRLLAEGKQISYASIVPLLVKFADSKSSLVINALYTTAAKLRQFVEPESNEEKNLKKLYDLLSKDQVARLGWEVKPGESDEDVQIRPYELSASLYAENADSIKAAHQIFTENEDNLEALNADIRPYVLINEVKNFGNAELVDKLIKEYQRTADPSYKVDLRSAVTSTKDLAAIKAIVGDFENADVVKPQDLCDWYRGLLANHYGQQAAWDWIREDWDWLDKTVGGDMEFAKFITVTAGVFHTPERLKEFKEFFEPKINVPLLSREIKMDVKVIESKVNLIEAEKDAVNDAVAKAID

SEQ ID NO: 900 - DNA, 2649 bp, Schizosaccharomyces pombe
  CDS (1)..(2649)
atgcaagtcaccattcctaaatctacttctaaggaagacgataaaaatcggaatttgcttccaaaaaatgttaaacccatccactatgatttgagtttatatccagatttggagacgttcacttacggcggtaaagtcgtcgttaccttggatgtacttgaggacagcaacagtattactctacatggcattaaccttcgtattttgacggctgcgttagaatggggcagccaaaccgtctgggccagcgaagtctcttatggggatgagcgtatcgttcttcaatttccctccactgtcccagccaactctgttgctgttttgacgttgcctttcactgcccgtatttccagtggcatggagggtttctaccgctctagttacgttgacagcgatggtaataccaagtatcttgccacgacccagatggagcctactagtgctcgtcgtgctttcccctgctgggatgaacctgctttgaaagctacctttaccatcgatatcactgctaaggaaaactatactatccttagtaacatgaatgccgttgaggaaactgtcaaggatggtttgaaaactgcccgttttgccgaaacttgccgaatgtccacttaccttttggcttggattgttgccgaactcgaatacgttgagtatttcacccctggcaagcattgcccccgtcttcctgttcgtgtttatactacacctgggttttccgaacagggtaaatttgctgcggaattaggtgctaagaccttagacttcttctctggtgtatttggcgagccatatcctttacccaaatgcgatatggttgctattcctgattttgaagcaggtgctatggaaaattggggtttagttacctacagacttgctgccatcttggtttctgaggattccgctgctactgtaattgaacgtgtagccgaagttgtacaacacgaattagcccatcagtggtttggtaatcttgttaccatgcaattttgggacggcttatggcttaatgagggtttcgctacctggatgtcatggtttagctgtaaccatttttaccctgaatggaaggtttgggaatcttatgttacagacaaccttcaatctgctctttcgttggatgcacttcgttccagtcatcctattgaagttcccattatgcacgattacgaaattaaccaaatatttgacgctatctcttactctaaaggttcttgtgttatccgcatggttagcaagtatgttggcgaagatacgtttattaagggtattcaaaaatacatttctaagcaccgttatggtaacacagttacggaagacttatgggctgccttgtcggcagaatcaggtcaggacatctcttccactatgcacaattggactaagaagacaggttatcccgtgctatccgtttctgaaaccaatgatggagagcttttaattgagcaacatcgatttttgtcaacaggagacgttaaacccgaagaagatactgtaatttattgggcccccttaaaacttaaaacgatgaaggatggtaaagcagttgttgatgaaaaagctgtgctttcagaccgatccaagaaaattaaagttgataaagaggctctcgaatcttataagctaaactctgaacaatctggtatctaccgtgttaactattctgccgatcatttaaagaagttatctcaaattgcggttgaaaagccagattatcttagtgtcgaggatcgtgctggtttaattgccgacgtcgcttctctctcgagagctggctacggtaaagttagcagcactttagatcttatcaaaacttggaaagacgagcctaactttgtagtctttgctgagatgcttgcccgcttgaatggtataaagtccactttacgtttcgaaagttctgatatcattgctgcaatgaaaaagttagttctggaggtttctgctactaaagcccattcactcggctgggaattcaaggcaaatgacgatcatatcattcgccaatttaagagtacagtatacaattatgccggtttgtttggtgatgataaggtggttaaggatgcactttccaagtttgatgcttacgcgtctggtaataagtccgccattaatgataatttgagatccgccgtatttaacattgcaattcgttatggtggtgctaagtcgtgggatcaacttcttgaaatttatactaaaactaatgatccttatgtccgtaatagttgtttgagagcctttggtgttactgaagatgaaaagtatattcaaaaaactttggatttaacccttgaccctattgtcaaggaacaagatatttatcttattttggttacattgagtactcacaaaaacggtgttttggcaatgtggaagtttgctacttctaactgggataagttgctttcaagacttcctgttgctggtacaatgcgtggctacgttgtgagattcgtaacaagtggattcactcatgcctccgctattgataaaattaaggaattttttgccgataaagatacgaagttgtatgaacgtgcacttcaacaatctttggacactatttctgctaattcaagtttcatcgacaaatcactggatgatatcactcgctggcttaaggagaatcgttatatgtaa

SEQ ID NO: 901 - protein, 882 aa, Schizosaccharomyces pombe
MQVTIPKSTSKEDDKNRNLLPKNVKPIHYDLSLYPDLETFTYGGKVVVTLDVLEDSNSITLHGINLRILTAALEWGSQTVWASEVSYGDERIVLQFPSTVPANSVAVLTLPFTARISSGMEGFYRSSYVDSDGNTKYLATTQMEPTSARRAFPCWDEPALKATFTIDITAKENYTILSNMNAVEETVKDGLKTARFAETCRMSTYLLAWIVAELEYVEYFTPGKHCPRLPVRVYTTPGFSEQGKFAAELGAKTLDFFSGVFGEPYPLPKCDMVAIPDFEAGAMENWGLVTYRLAAILVSEDSAATVIERVAEVVQHELAHQWFGNLVTMQFWDGLWLNEGFATWMSWFSCNHFYPEWKVWESYVTDNLQSALSLDALRSSHPIEVPIMHDYEINQIFDAISYSKGSCVIRMVSKYVGEDTFIKGIQKYISKHRYGNTVTEDLWAALSAESGQDISSTMHNWTKKTGYPVLSVSETNDGELLIEQHRFLSTGDVKPEEDTVIYWAPLKLKTMKDGKAVVDEKAVLSDRSKKIKVDKEALESYKLNSEQSGIYRVNYSADHLKKLSQIAVEKPDYLSVEDRAGLIADVASLSRAGYGKVSSTLDLIKTWKDEPNFVVFAEMLARLNGIKSTLRFESSDIIAAMKKLVLEVSATKAHSLGWEFKANDDHIIRQFKSTVYNYAGLFGDDKVVKDALSKFDAYASGNKSAINDNLRSAVFNIAIRYGGAKSWDQLLEIYTKTNDPYVRNSCLRAFGVTEDEKYIQKTLDLTLDPIVKEQDIYLILVTLSTHKNGVLAMWKFATSNWDKLLSRLPVAGTMRGYVVRFVTSGFTHASAIDKIKEFFADKDTKLYERALQQSLDTISANSSFIDKSLDDITRWLKENRYM

SEQ ID NO: 902 - DNA, 2355 bp, Sulfolobus solfataricus
  CDS (1)..(2355): transl_table=11
atgcctaacatcgagaaatacgaaatttttctggattttaatgggaatgaatatgagggtgtagagaaaatataccttaactcagaagaagaaaaattagagcttgatagtgtgaatctcgaaataagaagtgtgaaatctgatggtaaggatacaaaatttgaattgaaaggtgagaaattagtaatctacggaaagattgaaagagaacttgagataaagtttaaaggaaaagcctctcgggattcaattttagggatttacgttgctccttatgatggtaaaggaatgattacaacgcaatttgaggcagtatacgctaggagatttatcccatgttttgatcatcctgcaatgaaagctagatttaaactaagcgttagggtacaaaagggactaaaggtaatatctaatatgccagttgagagaatagaagaggatgtggacggtaaggtaatttatcgttttcaagaaactcctaaaatgtctacgtatctattatacttgggaatagatgaatttgaggagatttctgataactctaaacaacctacagtaatattagccacagtacccggaaaatcaaaaagaggactattcgcaattaacgtcgccagaaaggtcattgagttttatgaaaaatactttgaaataccttatcagttaccaaaagttcatttaatacaagttcccgagtttgctgctggcgctatggagaattggggtgctattacctttagggagactgctttgctggctgatgattcttcttcaatttctcaaaagtttagagttgctgaggttgttgctcatgagttggctcatcagtggtttggtaatttggttactttgaagtggtgggatgatttgtggttaaacgagagcttcgcaacattcatgagctataagagtataaagcatttatttccccaatgggatagtgaaggtcatcttatttatgacgaatctataggtgctttagaggatgactctctttctactacacatccaatagaggcacatgtaaaagatccccatgaaattgaacaaatgtttgataatattagttatggtaagggggctagtattttaaagatgattgaggcttatgttggtgaggagaatttcagaaggggggttgtcaattacttaaattctttcaaattcggaaatgcagagggtaaggatttgtggaattctatttctaacgcagctgggcagagtattggagaaattatggctgattggattacaaagcctggttaccctgtaatttttgtcaacgcatacggtaattctatcaggttttctcaaaaaagatttacacttcttgatagcggtttaaatgaggtttacaaggttccaattacatatgagattaatgataaatttggcactcttcttctggacaaggaatcagctgaaataaggttagatgaaggtttgaagagtattaaggttaatataaataggactggattttatagggtcctttatgattctcttaatctagctttctcatcaaagcttaatgcttatgaagagttgggattggttaacgactattggaatttcctattggctgatctaatagatgcgaagacgtactttggcgtaattggtaggtttgtatatacttctaactcttttgtatcaagagagataacctctcaactcttaacattatattatctatttaagaaaaattacgggaaagatttcctagttaatcaagttaagatatttagaaaggctaatgacgacctaggcaaattagcgtattcaactgttatcagtgccttagctagaatggatgaagagtttgcattaggattatcaactttatttgatcaatatgaaaatatagacagtaatattaaagaagctgttgcaatagcttacgcagtaactaataacgacttcaatactcttctagaaaagtacaagaggtatacaatagatgaggagaagaatagaatattaagtgcaatttcatcacttcgtgatccatcaattgtagtcaaggttttctcactaatatttgaaaggaatataaaggctcaagatactagattcgttatatcttcactgctacacaatcctcatataagggaggaagtatgtagttatcttatgaacaattttgaggaagttaagaaattcgtaaatacagtttatggaggtccttggggtttaggctctatagttaggagtatgtcattctgcggtgtagataagcctaaagacattattgactttcttgaaaaggtgaagttcaaggagatcgaaagacctattaaagagtctgaagagaggataaaagtatattctcgattaaaacaaaacctaccataa

SEQ ID NO: 903 - protein, 784 aa, Sulfolobus solfataricus
MPNIEKYEIFLDFNGNEYEGVEKIYLNSEEEKLELDSVNLEIRSVKSDGKDTKFELKGEKLVIYGKIERELEIKFKGKASRDSILGIYVAPYDGKGMITTQFEAVYARRFIPCFDHPAMKARFKLSVRVQKGLKVISNMPVERIEEDVDGKVIYRFQETPKMSTYLLYLGIDEFEEISDNSKQPTVILATVPGKSKRGLFAINVARKVIEFYEKYFEIPYQLPKVHLIQVPEFAAGAMENWGAITFRETALLADDSSSISQKFRVAEVVAHELAHQWFGNLVTLKWWDDLWLNESFATFMSYKSIKHLFPQWDSEGHLIYDESIGALEDDSLSTTHPIEAHVKDPHEIEQMFDNISYGKGASILKMIEAYVGEENFRRGVVNYLNSFKFGNAEGKDLWNSISNAAGQSIGEIMADWITKPGYPVIFVNAYGNSIRFSQKRFTLLDSGLNEVYKVPITYEINDKFGTLLLDKESAEIRLDEGLKSIKVNINRTGFYRVLYDSLNLAFSSKLNAYEELGLVNDYWNFLLADLIDAKTYFGVIGRFVYTSNSFVSREITSQLLTLYYLFKKNYGKDFLVNQVKIFRKANDDLGKLAYSTVISALARMDEEFALGLSTLFDQYENIDSNIKEAVAIAYAVTNNDFNTLLEKYKRYTIDEEKNRILSAISSLRDPSIVVKVFSLIFERNIKAQDTRFVISSLLHNPHIREEVCSYLMNNFEEVKKFVNTVYGGPWGLGSIVRSMSFCGVDKPKDIIDFLEKVKFKEIERPIKESEERIKVYSRLKQNLP

SEQ ID NO: 904 - DNA, 2346 bp, Sulfolobus tokodaii
  CDS (1)..(2346): transl_table=11
atggtctctatagataaatacgaaatcttccttgattttgattttaagaatttgatatataagggatatgagaagatatatttaagcactgataatgaagtagttctagatagcgtgggactaaatatagtttctgttaagactgaggggaagagtgttccattcaaaatttctgacagtcaaatattcattcaaactggaaaatttgatggagttttagaaatagaattcgaaggaaaagtaaaagaaagaggcttagttggtatttataaagctccttatgatcacagttatataattacaacccaatttgaatctgttcatgctagggaatttataccttgtatagaccatccagcattcaaagctagatttaaattaagtgttaaggtggacaaggatttagatgtaatatctaatatgcctatagaggatgtaagggaggaaggtgataaaaaaattgtgacttttcaagagactccgagaatgtcaacatatttgctatatttgggtattggtaaattcgaagaaattaaggataaacttggagaagttgatattatagttgctacagttccgggaagaataagtaaaggtaaattcgctctagatgttgcaaagaaagtaattgagtattatgaagattactttggtataaaatatcagttacccaaagagcatctaatagctatcccagaattcgcttttggagcaatggagaattggggagcaataacctttagagagaccgctctgcttgcagatgaatcttcttcagtgcagcagaaaatgagggtagcttctgttgttgctcacgaattagcccaccaatggtttggagatttagtaacaatgaaatggtgggatgacttatggttaaatgagagttttgcgacctttatgagtcataaagctattgctgaattatataaggaatgggatttctggggtacttttataaatagtgaaacttctggagctctatttagagattccttaactacaacccatccaatagaagctcatgtgacttctccagaagaaattgaacaattatttgatgatataagttatggtaagggagctagcattttaaggatgattgaagcttatttaggagatgaagattttagaaaaggtattcaaatttatctaaatacttacaaatatagtaatgctactggaagtgatttttggaatagtttagagaaaggttctggaaaaccagtaagtgaaatagtaaaggattggataactaaggatggttatcctgtagtttatgtatccgttaatggtagtaagataaacttagagcaagagaggttttatttaaaaggaaatggaaagaatgcagtctataaggttcctttaacacttgaggtaaatggaagaaaaataacgtatttacttgaaaaggagaaggatagtattgatattggaagtgatataaagagtataaaagtaaacatagatagaactggattctatagagtgtattataacgatttatccctagttttcaactcaaaactttctcatttagataaatggggactatttaacgactactttaacttcttcttagctggtagagtaaattacacaacttatgagagtatagcaaaacaatttatgaaagacgacaattatttagtagtggatgaacttgttagtgagttatactatctctggagagttaatagagataagtataaattattatatgaggtattaccatatcaagtaaagcgattttcgaagagaaaggatgaattatcaagaaggacctacagttatttattaagtacttttgcatttgttgatgagaagtttgctagtggactcgctgtagcgtttgagaaatacgataccttagatcctaatgtaaaggaagctgttgcaattgcatatgccgtaacttatggtgaagatgcttatgatgagcttcttaataagtatagaagtgaaaagtttgatgaagagaaaactagattattatatggtctcttaagtttcagagaaccctatttagttgttaatacgatgagtttagcattaactggtgaaattaagagacaagatgtagctaggatattaccttatgcaagttataatccatattctcgtttagcactgtggaagtggcttaagactcatatggagttcttgagaagtatatatgccggtacagcaatattaggtagaaccttaaggagcgtaatacccttcttaggacttaataacgctgaagttgttgagtacttcactactaatagattcccagaaatggaagtggagataaagagtggtttagagattttagattcactgagaagaattatctaa

SEQ ID NO: 905 - protein, 781 aa, Sulfolobus tokodaii
MVSIDKYEIFLDFDFKNLIYKGYEKIYLSTDNEVVLDSVGLNIVSVKTEGKSVPFKISDSQIFIQTGKFDGVLEIEFEGKVKERGLVGIYKAPYDHSYIITTQFESVHAREFIPCIDHPAFKARFKLSVKVDKDLDVISNMPIEDVREEGDKKIVTFQETPRMSTYLLYLGIGKFEEIKDKLGEVDIIVATVPGRISKGKFALDVAKKVIEYYEDYFGIKYQLPKEHLIAIPEFAFGAMENWGAITFRETALLADESSSVQQKMRVASVVAHELAHQWFGDLVTMKWWDDLWLNESFATFMSHKAIAELYKEWDFWGTFINSETSGALFRDSLTTTHPIEAHVTSPEEIEQLFDDISYGKGASILRMIEAYLGDEDFRKGIQIYLNTYKYSNATGSDFWNSLEKGSGKPVSEIVKDWITKDGYPVVYVSVNGSKINLEQERFYLKGNGKNAVYKVPLTLEVNGRKITYLLEKEKDSIDIGSDIKSIKVNIDRTGFYRVYYNDLSLVFNSKLSHLDKWGLFNDYFNFFLAGRVNYTTYESIAKQFMKDDNYLVVDELVSELYYLWRVNRDKYKLLYEVLPYQVKRFSKRKDELSRRTYSYLLSTFAFVDEKFASGLAVAFEKYDTLDPNVKEAVAIAYAVTYGEDAYDELLNKYRSEKFDEEKTRLLYGLLSFREPYLVVNTMSLALTGEIKRQDVARILPYASYNPYSRLALWKWLKTHMEFLRSIYAGTAILGRTLRSVIPFLGLNNAEVVEYFTTNRFPEMEVEIKSGLEILDSLRRII

SEQ ID NO: 906 - DNA, 2352 bp, Thermoplasma acidophilum
  CDS (1)..(2352): transl_table=11
atgaatccaggtattgaaaaatatgagattcgattcgacttcgacctgaaggatttcacatatacctcccacgagaggatacatctggctggagactggaaggatataaagctggatgcggtcaggctctctgtggacaaagtaacctgcaacggccagcccatgaggttcgaaactggacaagatacggtcacagtaaagggcagctttcacgataaggatgtcatagacatagattttcatgcaaaggtcagtgacacactcatgggactctatctttctaggacaaaggagggtaccatgatcacgacgcaattcgagtcaaacggtgcaaggatggcatttccctgcgtcgatcatccagcctacaaggctgtcttcgccataacagtagtgatcgacaaggattacgatgccatatcgaacatgcctccaaagcgcatcgaggtgtccgagaggaagatcgttgaattccaggacacaccgaagatgtctacgtaccttctgtacattggtgtgggcaaattcaagtatgccaccgacaaataccgcgatatagatctcatactcgtttcgcttaaggacataaaatcgaagtatccccttgagatcgcaaggaaatccattgaattctacgagagctacttcggcattccatacgctctcccgaagatgcaccttatctcagttccagagttcggtgcaggggcgatggagaactggggcgcgataacgttcagggaagttgcgctcatggcaacagagaactccggatccataatgaagcagaacgctgccataacgatagcgcatgagatagcgcaccagtggttcggcgatctcgtaacgatgaaatggtggaacgacctttggctgaacgagagtttcgccaccttcatgtcgtacaagacggttgattcgttcagcaaacagtgggacgtattcgccgacttcataagaagcgagacaggcggtgcgctaagatccgattcgctgaagaatacgcatcccatagaggttgatgtcaaggatcccgatgagatctcgcagatattcgatgagatcagctacggcaagggtgcatcgatactccgcatgatagaggattatgcaggttacgaggagttcaggaagggcatatcgaagtatctcaacgatcatagatacggaaatgcggaaggatccgatctctggactgcaatagaggatgtttccgggaagcctgtgaaacgcgtcatggagtactggataaagaatccgggatatcctgtagtctcagtggtgaaaagtggaaacaaattcaggctgacgcaggaacagttcttccttgacggaacaagaggacaaggaaaatggccaataccgttgactgttatgaccaagtctggaaagaaagccatgctcatggaggaaagcgctgaaatagaggacatggtgaaggtcaatgtcaacagcagcggcttctacagggtatcctacgatggagaatcgttcgaaactgtgatgaagaattattccaagctcagcaaccttgacagatggggcttgataagtgatctctatgctttcctgatctctggaagggtgtccgtggatgattaccttgcaagaatcaagggcttcttcgaggattccgatcatttgatcgtcgaggaaatagcctcacagctcaccggcctctatctgcttaagcctgattcgaacaggatcagagaaacagcagcttcttacctcagcaggcaggtggttgcgcttggcgacaagcagaagggcgaggatgataagatctcgaagataaggggcatcgttacgcaggatctggcgatggtcgatgatcactttgcttctgatttggcacgcaaattctcaacactcgcagaggatcctgatcttgcattggcaaagtctatagcggcggccaaggcatacggcatctccgagcttgccagcgctgcggacaagtacacagacgatgaaatacgcgtcaggatcatagctgccatgggctggtgcagcccatctgacctgaaaagcgtcttcgaactgatcgataaaggaactataagaaaacaggacatgctgtatgtgttcagcaacatgcctgcaaatccgaagggaagagatttcttcttctccaacatagacagaatagttgcactgatggagcatgcgtttgagggcacaggatacaccagcagaatacttgaaacagccataccatacctcggcctggccagatatgaagatgtcaagaaaaaggctgaacagataagaaaaccgagctacaacgttggaataaataagggccttgaaacgctggaaatagtaagaaaattgtataataaattataa

SEQ ID NO: 907 - protein, 783 aa, Thermoplasma acidophilum
MNPGIEKYEIRFDFDLKDFTYTSHERIHLAGDWKDIKLDAVRLSVDKVTCNGQPMRFETGQDTVTVKGSFHDKDVIDIDFHAKVSDTLMGLYLSRTKEGTMITTQFESNGARMAFPCVDHPAYKAVFAITVVIDKDYDAISNMPPKRIEVSERKIVEFQDTPKMSTYLLYIGVGKFKYATDKYRDIDLILVSLKDIKSKYPLEIARKSIEFYESYFGIPYALPKMHLISVPEFGAGAMENWGAITFREVALMATENSGSIMKQNAAITIAHEIAHQWFGDLVTMKWWNDLWLNESFATFMSYKTVDSFSKQWDVFADFIRSETGGALRSDSLKNTHPIEVDVKDPDEISQIFDEISYGKGASILRMIEDYAGYEEFRKGISKYLNDHRYGNAEGSDLWTAIEDVSGKPVKRVMEYWIKNPGYPVVSVVKSGNKFRLTQEQFFLDGTRGQGKWPIPLTVMTKSGKKAMLMEESAEIEDMVKVNVNSSGFYRVSYDGESFETVMKNYSKLSNLDRWGLISDLYAFLISGRVSVDDYLARIKGFFEDSDHLIVEEIASQLTGLYLLKPDSNRIRETAASYLSRQVVALGDKQKGEDDKISKIRGIVTQDLAMVDDHFASDLARKFSTLAEDPDLALAKSIAAAKAYGISELASAADKYTDDEIRVRIIAAMGWCSPSDLKSVFELIDKGTIRKQDMLYVFSNMPANPKGRDFFFSNIDRIVALMEHAFEGTGYTSRILETAIPYLGLARYEDVKKKAEQIRKPSYNVGINKGLETLEIVRKLYNKL

SEQ ID NO: 908 - DNA, 2352 bp, Thermoplasma volcanium
  CDS (1)..(2352): transl_table=11
atggatttcagtatagaagaatatgatttgaccttcgattttgacctcagtgagttcacctatcgtgggaaagaaaaaataaaactttctggtgaagcaaacgaactcgtacttgactctgtcaggttatccatagatagcgtcaaattgaatgggtcagccgttgattttgatgttaacgacaaggcgctcagaatagaaagcagaattaagagtggagatgtagtagatatcgactttcatgcaaaggtaagcgacacactaatgggattatacctttcgaagacaagagaaggtaccatgataactacacagttcgaatcaacaggcgctaggatggcttttccctgtattgatcatcctgcctacaaggcagtcttctcaataactcttgtaatagacaaagactacgatgcaatatcgaacatgcctgtaaagaaggtagagacatctgacaggaagatagtggagtttgagaagactccaaggatgtcaacctatctgctgtacataggtgttggaaagttcaagtatgcatcagaacgttacaaggacagggagataatacttgcatcccttaaggacattaagtcgaagtatccaatcgatatagctaaaaggtcaatagagttctacgaaggttacttcggaataccctatgcactgccaaagatgcacctgatatcagttccggaattcggagcaggtgcaatggagaactggggtgcaataacatttagagagatcgcacttatggcgactgaagattctggatcccttatgaagcaaaatgcagccataaccattgcccacgaaatagcccaccagtggttcggagatctcgtcacaatgaagtggtggaacgatctgtggctgaatgagagttttgcaacattcatgagttataagacggtcgattcgttcagcaaacagtgggacgtattttccgatttcataaagagcgagactggcggcgcacttcgctcagattctctcaagaatacgcaccctatagaggttgatgtaaaggatcctgatgagatatcgcagatatttgatgagataagctatggaaagggtgcgtcaatactcaggatgatagaagactatgttggtgctgaagacttcaggaagggcatatcgaaatacctaaaagaacatgcatatggaaacgcagaaggctctgatctatggaatgcaatagaaacagaatcaggaaaaccagtgaacaggataatggaggcatggataacaaaggcaggctatccagtattaaaggtaaacaaagacggtaataggataaggctaacgcaggaacagttttacctggacgggacaagtggaaacacggagtggccaataccgctcaccataataacaaaaaaaggcaaggtatctatgctaatggaggatgaagtgtacatagacgaaatgctcaaactaaacgcaaacaacagcggcttctacagggttatgtatgacaatgatactttcaacacggttataagtagcttagacaaattctcaaatctcgacaaatggggcctcttaaacgatatgtatgctttcttagtatccggcaggctctcagtcaacgaatatgtggaaaggataaagaacttcctaaatgatgaagatcacctggttgttgaagaaatagcttctcagcttacctccctatatctgataaaaccatcctctcaagtggtttatcagcttgccaaggactatcttaggaatcaagttcagagacttggaacgaaaaagaaaggtgaagacgacaagatctctaagctaaggggtatagtttaccaggacctcgtaactgtggatgaggattttgcaaaggagctttctccgcagttcgccagcctgagtgaggatcccgatcttgccttggcaaaagcagtagctaaagcgagaacagatggcctaaatgaactcattgacgctgcaaacaagtatacagacgatgaaataagggtaagagtgatagctgccatgggttggtgcagcaaggaccagctctccacaatattcagtcttatcgacaacggcaccattaaaaaacaagacatgctatatgtattttctttcgtggttacaaatccgtcaggaagagatttcttcttccaaaatattgacaaaatcgtctcgctgatggaacatgcgttcgaaggaacaggttacacaagtaggatacttgagggttccattccgtatataggtctcgaaaagtatgaagaaatcaaagctaaagccagccagatcagaagcccaagctacaatgttggaatagataaagggctcgaaactcttgaaataataagaaagttatataataaattatga

SEQ ID NO: 909 - protein, 783 aa, Thermoplasma volcanium
MDFSIEEYDLTFDFDLSEFTYRGKEKIKLSGEANELVLDSVRLSIDSVKLNGSAVDFDVNDKALRIESRIKSGDVVDIDFHAKVSDTLMGLYLSKTREGTMITTQFESTGARMAFPCIDHPAYKAVFSITLVIDKDYDAISNMPVKKVETSDRKIVEFEKTPRMSTYLLYIGVGKFKYASERYKDREIILASLKDIKSKYPIDIAKRSIEFYEGYFGIPYALPKMHLISVPEFGAGAMENWGAITFREIALMATEDSGSLMKQNAAITIAHEIAHQWFGDLVTMKWWNDLWLNESFATFMSYKTVDSFSKQWDVFSDFIKSETGGALRSDSLKNTHPIEVDVKDPDEISQIFDEISYGKGASILRMIEDYVGAEDFRKGISKYLKEHAYGNAEGSDLWNAIETESGKPVNRIMEAWITKAGYPVLKVNKDGNRIRLTQEQFYLDGTSGNTEWPIPLTIITKKGKVSMLMEDEVYIDEMLKLNANNSGFYRVMYDNDTFNTVISSLDKFSNLDKWGLLNDMYAFLVSGRLSVNEYVERIKNFLNDEDHLVVEEIASQLTSLYLIKPSSQVVYQLAKDYLRNQVQRLGTKKKGEDDKISKLRGIVYQDLVTVDEDFAKELSPQFASLSEDPDLALAKAVAKARTDGLNELIDAANKYTDDEIRVRVIAAMGWCSKDQLSTIFSLIDNGTIKKQDMLYVFSFVVTNPSGRDFFFQNIDKIVSLMEHAFEGTGYTSRILEGSIPYIGLEKYEEIKAKASQIRSPSYNVGIDKGLETLEIIRKLYNKL

SEQ ID NO: 910 - DNA, 2637 bp, Oryza sativa
  CDS (1)..(2637)
atggcgccggctccggctccggcgggctcggccgaccagttccgcgggcaggcgaggctgccgcggttcgcggcgccgcggcggtacgagctccgcctccggcccgacctcgacgcatgcgtcttcaccggcgacgcgtccgtggtcgtcgacgtctccgcgcccacccgcttcctcgtcctcaacgccgccgacctcgccgtcgaccgcgcctccatccgcttccaggggttggcgccgacggaggtgtcgctgttcgaggacgacgagatcctggtgctggagttcgacggggagctgccgctcggcgagggcgtgctcgccatggacttcaacggcacgctcaacgatcagatgaggggattttaccgaagtaaatatgagtataaaggggagacaaaaaacatggcggtgacacagtttgaggctgtggatgctcgacggtgcttcccctgctgggatgagcctgcattcaaggcaaagttcaagttaacacttgaagttccatctgagctagtagcattgtccaacatgccagtagcttgtgagacaattgctggtcctatcaagaccatccactacgaagaatcgccgcttatgtcaacttatttggtggccatagttgttggtttgtttgattatgtagaaggtgtaacatcggaaggcaacaaagtccgtgtgtacactcaagttggtaagagtagtcaagggaagtttgcactagatattggagtgaagtcattgaatttctacaaagactactttgatactccatatccactccctaagttggacatggttgctattcctgatttcgctgctggggccatggagaactatggattggtcacttaccgggaagtttctttgctttttgatgagcagtcttcatcagcatctttcaaacagaatgttgcaattaccgtggcacatgaactggctcatcaatggtttggtaatcttgtaaccatggaatggtggactcacttgtggctaaacgagggttttgctacatggatgagccatttgtcagtagattcttttttccctcaatggaatatctggacacagtttcttgatagtacaacctctgctctcaaattggattcacaagctgagtcccatcctattgaggttgaaatacaccatgccagtgaggtagatgagattttcgatgccattagctatgacaagggtgcttctgttattcgtatgctacaaagttacctaggtgcagagcgttttcagaaagcattaacttcatatataaaaaagtatgcctactcaaatgctaaaaccgaggacttgtgggctgttcttgaagaggtatctggtgaacctgtcaaggatttgatgactacgtggacgaagcaacaaggttatcctgttatcagcgtgaagcttaaagggcacgacttggaacttgaacaggaccaatttttgttaaatggaacctctggtgctggcatctggattgtccctataactttaggatgctgttcacatgataaacagaaaagattattgttgaaacataaacatgataacataaaggccattgtttcgcaatgtgatagccgacagaagggtggaaacttttggattaagttgaacattgatgaaacaggattttatagggttaaatatgatgatgagcttacagctgcacttcgaaatgcattgcaggccaagaagctctctctaatggacgaaattggcattgtggacgatgcacatgccctttctattgcctgcaagcaaacattgtcatcgttgctccacttgctgtatgcgttccgtgacgaggctgattacagtgttctttcacacataaattctgtaacttcaagtgttgcgaaaatatcaattgatgctactcctgacctggctggtgacatcaagcaactttttatcaagcttcttctcccgcctgctaaaaaattaggttgggaccctaaagatggtgaaagccacctgaatgcaatgctcagaccaatgcttttggttgcccttgttcagcttgggcatgataagactataaatgagggattcaggcgtttccaaatcttctttgatgatcgcaacacttcccttcttactccagatactagaaaggctgcatacctctctgtgatgcataatgttagtagcacaaacagatctggttatgatgctcttctaaaggtctacaggaaatcagctgaaggggaggaaaagttacgtgtcttaggcacactttcttcttgccaggataaggatattgttcttgaatcattgaatttaattttcacagatgaggttcgcaatcaagatgcatatcgtgtgcttggaggtgtcataatagaggcacgtgaaactgcatggtcctggttgaaggaaaactgggatcgtatctcggaggcattttcaggaagttccctcatatcggatttcataagatctattgttacactgttcacctcgaaagagaaggaagcagagatctcccagttcttcgcgacccgcactaagcccgggtacgagaggacactgaagcagagcctcgagagggtgctgatcaacgccaggtggatcgaaggcatcaggggtgaagctaagcttgctcagactgtccatgagcttcttcacaaaccctga

SEQ ID NO: 911 - protein, 878 aa, Oryza sativa
MAPAPAPAGSADQFRGQARLPRFAAPRRYELRLRPDLDACVFTGDASVVVDVSAPTRFLVLNAADLAVDRASIRFQGLAPTEVSLFEDDEILVLEFDGELPLGEGVLAMDFNGTLNDQMRGFYRSKYEYKGETKNMAVTQFEAVDARRCFPCWDEPAFKAKFKLTLEVPSELVALSNMPVACETIAGPIKTIHYEESPLMSTYLVAIVVGLFDYVEGVTSEGNKVRVYTQVGKSSQGKFALDIGVKSLNFYKDYFDTPYPLPKLDMVAIPDFAAGAMENYGLVTYREVSLLFDEQSSSASFKQNVAITVAHELAHQWFGNLVTMEWWTHLWLNEGFATWMSHLSVDSFFPQWNIWTQFLDSTTSALKLDSQAESHPIEVEIHHASEVDEIFDAISYDKGASVIRMLQSYLGAERFQKALTSYIKKYAYSNAKTEDLWAVLEEVSGEPVKDLMTTWTKQQGYPVISVKLKGHDLELEQDQFLLNGTSGAGIWIVPITLGCCSHDKQKRLLLKHKHDNIKAIVSQCDSRQKGGNFWIKLNIDETGFYRVKYDDELTAALRNALQAKKLSLMDEIGIVDDAHALSIACKQTLSSLLHLLYAFRDEADYSVLSHINSVTSSVAKISIDATPDLAGDIKQLFIKLLLPPAKKLGWDPKDGESHLNAMLRPMLLVALVQLGHDKTINEGFRRFQIFFDDRNTSLLTPDTRKAAYLSVMHNVSSTNRSGYDALLKVYRKSAEGEEKLRVLGTLSSCQDKDIVLESLNLIFTDEVRNQDAYRVLGGVIIEARETAWSWLKENWDRISEAFSGSSLISDFIRSIVTLFTSKEKEAEISQFFATRTKPGYERTLKQSLERVLINARWIEGIRGEAKLAQTVHELLHKP

SEQ ID NO: 912 - DNA, 2622 bp, Glycine max
  CDS (1)..(2622)
atggatcagttcaaaggacagcctcgccttccgaaattcgtcgttccgaaacgctatgacattaggctcaagcccgacctcgtcgcgcaccgttttgcaggttccgtcgccgtcaacctcgacatcgtcgccgccacctctttcatcgttctcaatgccgccgaactcgacgttagcaacgacgccgtttcattcaccaaccaagattcctccaaggttattaaaccttctcgagttgagttgtttgaaaatgatgagattctggttttggagttcccagaggaattacctattggcttcggtgtcttgtccattcgctttgaaggaatcttgaatgatagaatgaaaggcttctaccgaagtacctatgagcacaatggtgagaagaagactatggcagttacacagtttgaaccagctgatgccaggcgatgctttccttgttgggatgaacctgcttgcaaggctactttcaagatcacattggatgtgccttcagagctcgttgctctttccaacatgccaattgttgaagaaataacagacggagatctgaaaacagtctcgtatcaagaatcaccaattatgtctacatatttggttgcggttgttgttggtttatttgattatgtggaagatcatacctcagatggggtcaaagtccgggggtattgtcaagttggtaaggcaaaccaggggaaatttgcacttgatgtagctgtgaaaactttggaactatacaagggttactttgccactccctactcgctgccaaaattggatatgattgcaatccctgatttcgctgctggagccatggagaactatggtttagttacatatcgggagactgctttgctatatgatgaccagcattctgctgctgcaaataaacagagggttgcaactgtagtagctcatgaactagcacaccagtggtttggcaaccttgttacaatggagtggtggacacatttgtggctgaatgaggggtttgcaacatgggtgagctatttagccactgatagctgttttcctgagtggaaaatatggtctcaatttcttcatgaatctactgagggtcttaagctggatggacttgcggagtcccacccaattgaggtagagatcaatcatgcttgtgagattgatgaaatatttgatgcaataagttatagaaaaggtgcatctgtaattaggatgctgcaaagctatcttggtgccgaatgctttcagaggtcgctggcttcatatataaaaagacatgcttgctcaaatgctaagactgaggatctatgggctgcacttgaggaaggatctggtgaacctgtgaacaagttaatgacctcatggacaaagcagaagggatatcctgttgtatctgttaaagtcaatgatcagaaattggaatttaatcagtcgcaattcttgtcaagcggtgctcaaggagaaggccattggattgttccaataacattatgctttggctcttatgatgtccacaagagtttcctcttgcaatcaaaatctgaaacacatgatgtcaaagatttccttggttccacacacaaaggtttaaattgttggattaaacttaatgtggatcaggctggtttctacagggtgaagtatgatgagctgcttgctgctagacttagatatgcagtagagaaacaactcttatctgcatcagaccgatttggcattttggatgattcatttgcactttgtatggctcgccaagaatcattgacctccttgattaacttgatgggatcttacagggaggaagttgattataccgtgctgtctaacctgataactataagtcttaaagttcaacgtattgcagctgatgcagtaccagacttactagaatatttcaagcagttctttattaaccttttccagtactctgctgagaggcttggttgggagcctaaaccaggagagagtcatgtagatgcaatgttgagaggagaaattttgactgcccttgctatgtttggtcacgatttaacactggatgaagcaagcaagcgttttcaggcattcttagaaaacagaaatacaccacttcttccacctgatataagaaaggcggcatatgtagctgtaatgcaacgggcaagcaaatctaacagatcgggttatgaatcccttttgaaagtatataaggaagctgacctaagtcaggagaaaacgcgtattctgggctctctggcatcttcacgtgatccagatctaattcttgaagctctaaacttcatgttgtcatctgaggttcgtagtcaggatgctgtttttggacttgctgttacccgggaaggacgagatgtagcttgggcatggcttaaggaaaattgggaacacctcataaaaacatatggttcaggatttttgataactcggtttgtcggtgcagttgtctcaccgtttgcttcctttgagaaggccaaggaggtagaggaattctttgctacccacgctatgccatccattgctagaacgttaaggcagagccttgagcgggtcaatatcaatgcaaattgggttcagagtgttcagaacgaaaataggcttggtgatgctatgaaggaattggcatacagagtttactag

SEQ ID NO: 913 - protein, 873 aa, Glycine max
MDQFKGQPRLPKFVVPKRYDIRLKPDLVAHRFAGSVAVNLDIVAATSFIVLNAAELDVSNDAVSFTNQDSSKVIKPSRVELFENDEILVLEFPEELPIGFGVLSIRFEGILNDRMKGFYRSTYEHNGEKKTMAVTQFEPADARRCFPCWDEPACKATFKITLDVPSELVALSNMPIVEEITDGDLKTVSYQESPIMSTYLVAVVVGLFDYVEDHTSDGVKVRGYCQVGKANQGKFALDVAVKTLELYKGYFATPYSLPKLDMIAIPDFAAGAMENYGLVTYRETALLYDDQHSAAANKQRVATVVAHELAHQWFGNLVTMEWWTHLWLNEGFATWVSYLATDSCFPEWKIWSQFLHESTEGLKLDGLAESHPIEVEINHACEIDEIFDAISYRKGASVIRMLQSYLGAECFQRSLASYIKRHACSNAKTEDLWAALEEGSGEPVNKLMTSWTKQKGYPVVSVKVNDQKLEFNQSQFLSSGAQGEGHWIVPITLCFGSYDVHKSFLLQSKSETHDVKDFLGSTHKGLNCWIKLNVDQAGFYRVKYDELLAARLRYAVEKQLLSASDRFGILDDSFALCMARQESLTSLINLMGSYREEVDYTVLSNLITISLKVQRIAADAVPDLLEYFKQFFINLFQYSAERLGWEPKPGESHVDAMLRGEILTALAMFGHDLTLDEASKRFQAFLENRNTPLLPPDIRKAAYVAVMQRASKSNRSGYESLLKVYKEADLSQEKTRILGSLASSRDPDLILEALNFMLSSEVRSQDAVFGLAVTREGRDVAWAWLKENWEHLIKTYGSGFLITRFVGAVVSPFASFEKAKEVEEFFATHAMPSIARTLRQSLERVNINANWVQSVQNENRLGDAMKELAYRVY

SEQ ID NO: 914 - DNA, 2640 bp, Zea mays
  CDS (1)..(2640)
atggcggcggagcagaccgccgagcagttccggggccaggcgcggctgccccacttcgcgtccccgcggcgctacgacctgcgcctcacgcccgacctccccgcctgcgtcttcactggctcggtggcggtttccatcggcgtggccgcgcccacccgcttcctcgtactcaacgcagccgagcgcgacgtcgcgaccgagggcgtcagcttcgcgcctcagggctccgaccaggtgctacaacctttggaggttaccaacgtgccagaagatgagatcctgattattcgcttcaatgaggtgctttctatcggggagggaactttgacgattgcattcaaggggactttgaatgataagatgcatggattctacagaagtgtgtatgagcttaatggagagaagaaaaacatggctgtaacacagtttgaaccagctgatgcaaggcgctgcttcccttgttgggatgagcctgctttcaaggctgttttcaaaattactctagaagttccttctgagacgattgctctgtcaaatatgccagtaattgaagagaaggtcaatggccctaccaaaatagtctacttccaagaatctccgataatgtctacatacttagtggctgttattgttggcaattttgactatgtggaagatttcaccacagatggtactagggtccgtgtttacacacaagtcggtaagagtgcgcaggggaggtttgctctagaggttgccttgaagacattggtcctgtttaaggagtattttgctgtgccataccccctccccaaaatggacatggttgctattccagattttgcagctggagccatggagaactatggcttggttacataccgtgaaacagcattgctatttgatgagatgcactctgcagctgccaataagcaacgggttgcagttgttgtagctcatgaattagctcatcaatggtttggaaatcttgtcacaatggaatggtggacacatctgtggcttaatgagggctttgcgacttgggtgtcttacttagctgcagatcagttctttcctgaatggaatgtttggactcagtttctagaggaatctacagtaggtttcaagttggatgctcttgcaggttcacatccaattgaggtggacataaatcatgttgatgaaatagatgagatatttgatgctataagctataggaaaggagcttctgtcattcggatgctgcaaaactatcttggggctgaggtctttcagaattctttggctgcatacatcaaaagatttgcgtattcaaatgcaaagactgaggacttatgggctgcccttgaagaggggtctggtgaaccagttagaacattaatgcattcatggaccaaacagcaaggttatcctgtcattactgtgaaactcaaggatggaaagttccaactggagcagacacaatttctttcaagtggatctacaggagttgggcaatgggttgttcccatcacactatgttgttgttcctactcgcgccaagcgaagttcctttttcatgggaaacaagaagattttgatttgtcagcgtccgggtttacggactgccaaaagaaagatggcttctggattaaacttaatgtcaaccagaccagcttctatagggtgagctatgatgaggaacttgcagcccgacttcgatatgcaattgaaaccaacaaactgggtgcagcagacagatatggtgtacttgatgatgcctatgccctctgtatggctggcaaacaaaagctagtctccttgctgcatttgatttctgtgtacaaggatgagactgagtatactgtgcttgcacacataatcacgacaagtctgcacattgccgagatgatggctattgctgctccagaggagttggttcatctgaagaagttcctaattgatttcctggagccatttgcgctgaaacttggctgggatgctaagagtgacgagggccatctgaacgctttgttaagaggtacactcttaaccgctctggcagaacttggccatgaggctaccataaatgaagctgttcgtcgatttaatgtctttctggaagacagagagacaccactccttcctcccgatgttcgaaaggcagcatatattgctttgatgcagacagtgagcaaatcaaacaaaactggctatgaatcactactgagggtatatagggaaaccgatctaagccaggagaaagttcgtgtgttaggttctttggcatcatcccctgaccatgatgttgtccgtgaagtattgaatttcatattgtcacctgaggtgaggaatcaggacgcaatatttttgctaagaggggtgagttcaggggcacacgaggtagcatggcaatggctgaaggaaaactgggattacatattgggagcctactctggaactctgctcacctatttcgtcaacataactgtctcgccactggccaccgatgaacatggtgatgaggcggaggagtttttcaagagcagaaccaaggcgaacatcgcgaggactgtgaggcagagcatcgagagggtgaggatcaatgcccaatgggtcaagaacatcaaggccgaggctgacctcggcaatgttctcaagaagctggcttacaagcactga

SEQ ID NO: 915 - protein, 879 aa, Zea mays
MAAEQTAEQFRGQARLPHFASPRRYDLRLTPDLPACVFTGSVAVSIGVAAPTRFLVLNAAERDVATEGVSFAPQGSDQVLQPLEVTNVPEDEILIIRFNEVLSIGEGTLTIAFKGTLNDKMHGFYRSVYELNGEKKNMAVTQFEPADARRCFPCWDEPAFKAVFKITLEVPSETIALSNMPVIEEKVNGPTKIVYFQESPIMSTYLVAVIVGNFDYVEDFTTDGTRVRVYTQVGKSAQGRFALEVALKTLVLFKEYFAVPYPLPKMDMVAIPDFAAGAMENYGLVTYRETALLFDEMHSAAANKQRVAVVVAHELAHQWFGNLVTMEWWTHLWLNEGFATWVSYLAADQFFPEWNVWTQFLEESTVGFKLDALAGSHPIEVDINHVDEIDEIFDAISYRKGASVIRMLQNYLGAEVFQNSLAAYIKRFAYSNAKTEDLWAALEEGSGEPVRTLMHSWTKQQGYPVITVKLKDGKFQLEQTQFLSSGSTGVGQWVVPITLCCCSYSRQAKFLFHGKQEDFDLSASGFTDCQKKDGFWIKLNVNQTSFYRVSYDEELAARLRYAIETNKLGAADRYGVLDDAYALCMAGKQKLVSLLHLISVYKDETEYTVLAHIITTSLHIAEMMAIAAPEELVHLKKFLIDFLEPFALKLGWDAKSDEGHLNALLRGTLLTALAELGHEATINEAVRRFNVFLEDRETPLLPPDVRKAAYIALMQTVSKSNKTGYESLLRVYRETDLSQEKVRVLGSLASSPDHDVVREVLNFILSPEVRNQDAIFLLRGVSSGAHEVAWQWLKENWDYILGAYSGTLLTYFVNITVSPLATDEHGDEAEEFFKSRTKANIARTVRQSIERVRINAQWVKNIKAEADLGNVLKKLAYKH

SEQ ID NO: 916 - DNA, 23 bp, Artificial sequence
  primer
atgtcccgtgaagtactgccaaa

SEQ ID NO: 917 - DNA, 24 bp, Artificial sequence
  primer
ctattgatcatactcatgctcacg

SEQ ID NO: 918 - protein, 958 aa, Artificial sequence
  consensus sequence
  Variant (2)..(3): Xaa in position 2 to 3 is any amino acid
  Variant (5)..(16): Xaa in position 5 to 16 is any amino acid
  Variant (17)..(20): Xaa in position 17 to 20 is any or no amino acid
  Variant (22)..(84): Xaa in position 22 to 84 is any amino acid
  Variant (85)..(108): Xaa in position 85 to 108 is any or no amino acid
  Variant (110)..(110): Xaa in position 110 is any amino acid
  Variant (112)..(114): Xaa in position 112 to 114 is any amino acid
  Variant (116)..(119): Xaa in position 116 to 119 is any amino acid
  Variant (120)..(136): Xaa in position 120 to 136 is any or no amino acid
  Variant (139)..(139): Xaa in position 139 is any amino acid
  Variant (141)..(143): Xaa in position 141 to 143 is any amino acid
  Variant (146)..(147): Xaa in position 146 to 147 is any amino acid
  Variant (150)..(151): Xaa in position 150 to 151 is any amino acid
  Variant (155)..(156): Xaa in position 155 to 156 is any amino acid
  Variant (159)..(159): Xaa in position 159 is any amino acid
  Variant (161)..(174): Xaa in position 161 to 174 is any amino acid
  Variant (175)..(176): Xaa in position 175 to 176 is any or no amino acid
  Variant (179)..(189): Xaa in position 179 to 189 is any amino acid
  Variant (190)..(246): Xaa in position 190 to 246 is any or no amino acid
  Variant (248)..(249): Xaa in position 248 to 249 is any amino acid
  Variant (251)..(252): Xaa in position 251 to 252 is any amino acid
  Variant (255)..(255): Xaa in position 255 is any amino acid
  Variant (258)..(258): Xaa in position 258 is any amino acid
  Variant (260)..(262): Xaa in position 260 to 262 is any amino acid
  Variant (264)..(308): Xaa in position 264 to 308 is any amino acid
  Variant (309)..(331): Xaa in position 309 to 331 is any or no amino acid
  Variant (333)..(334): Xaa in position 333 to 334 is any amino acid
  Variant (336)..(340): Xaa in position 336 to 340 is any amino acid
  Variant (341)..(345): Xaa in position 341 to 345 is any or no amino acid
  Variant (347)..(349): Xaa in position 347 to 349 is any amino acid
  Variant (351)..(352): Xaa in position 351 to 352 is any amino acid
  Variant (358)..(358): Xaa in position 358 is any amino acid
  Variant (361)..(361): Xaa in position 361 is any amino acid
  Variant (365)..(367): Xaa in position 365 to 367 is any amino acid
  Variant (370)..(370): Xaa in position 370 is any amino acid
  Variant (372)..(382): Xaa in position 372 to 382 is any amino acid
  Variant (383)..(385): Xaa in position 383 to 385 is any or no amino acid
  Variant (387)..(387): Xaa in position 387 is any amino acid
  Variant (389)..(390): Xaa in position 389 to 390 is any amino acid
  Variant (393)..(393): Xaa in position 393 is any amino acid
  Variant (400)..(400): Xaa in position 400 is any amino acid
  Variant (405)..(405): Xaa in position 405 is any amino acid
  Variant (408)..(409): Xaa in position 408 to 409 is any amino acid
  Variant (415)..(415): Xaa in position 415 is any amino acid
  Variant (418)..(429): Xaa in position 418 to 429 is any amino acid
  Variant (430)..(432): Xaa in position 430 to 432 is any or no amino acid
  Variant (434)..(434): Xaa in position 434 is any amino acid
  Variant (436)..(445): Xaa in position 436 to 445 is any amino acid
  Variant (446)..(449): Xaa in position 446 to 449 is any or no amino acid
  Variant (452)..(453): Xaa in position 452 to 453 is any amino acid
  Variant (455)..(469): Xaa in position 455 to 469 is any amino acid
  Variant (470)..(474): Xaa in position 470 to 474 is any or no amino acid
  Variant (476)..(478): Xaa in position 476 to 478 is any amino acid
  Variant (481)..(481): Xaa in position 481 is any amino acid
  Variant (482)..(482): Xaa in position 482 is any or no amino acid
  Variant (484)..(484): Xaa in position 484 is any amino acid
  Variant (486)..(486): Xaa in position 486 is any amino acid
  Variant (489)..(493): Xaa in position 489 to 493 is any amino acid
  Variant (495)..(499): Xaa in position 495 to 499 is any amino acid
  Variant (501)..(503): Xaa in position 501 to 503 is any amino acid
  Variant (505)..(506): Xaa in position 505 to 506 is any amino acid
  Variant (508)..(510): Xaa in position 508 to 510 is any amino acid
  Variant (512)..(518): Xaa in position 512 to 518 is any amino acid
  Variant (520)..(523): Xaa in position 520 to 523 is any amino acid
  Variant (527)..(532): Xaa in position 527 to 532 is any amino acid
  Variant (535)..(540): Xaa in position 535 to 540 is any amino acid
  Variant (541)..(542): Xaa in position 541 to 542 is any or no amino acid
  Variant (544)..(545): Xaa in position 544 to 545 is any amino acid
  Variant (547)..(550): Xaa in position 547 to 550 is any amino acid
  Variant (552)..(552): Xaa in position 552 is any amino acid
  Variant (554)..(567): Xaa in position 554 to 567 is any amino acid
  Variant (568)..(571): Xaa in position 568 to 571 is any or no amino acid
  Variant (573)..(574): Xaa in position 573 to 574 is any amino acid
  Variant (576)..(588): Xaa in position 576 to 588 is any amino acid
  Variant (589)..(592): Xaa in position 589 to 592 is any or no amino acid
  Variant (594)..(619): Xaa in position 594 to 619 is any amino acid
  Variant (620)..(642): Xaa in position 620 to 642 is any or no amino acid
  Variant (644)..(653): Xaa in position 644 to 653 is any amino acid
  Variant (655)..(664): Xaa in position 655 to 664 is any amino acid
  Variant (665)..(672): Xaa in position 665 to 672 is any or no amino acid
  Variant (674)..(687): Xaa in position 674 to 687 is any amino acid
  Variant (689)..(747): Xaa in position 689 to 747 is any amino acid
  Variant (748)..(761): Xaa in position 748 to 761 is any or no amino acid
  Variant (763)..(792): Xaa in position 763 to 792 is any amino acid
  Variant (793)..(804): Xaa in position 793 to 804 is any or no amino acid
  Variant (806)..(873): Xaa in position 806 to 873 is any amino acid
  Variant (874)..(890): Xaa in position 874 to 890 is any or no amino acid
  Variant (893)..(907): Xaa in position 893 to 907 is any amino acid
  Variant (908)..(911): Xaa in position 908 to 911 is any or no amino acid
  Variant (913)..(952): Xaa in position 913 to 952 is any amino acid
  Variant (953)..(957): Xaa in position 953 to 957 is any or no amino acid
PXXYXXXXXXXXXXXXXXXXGXXXXXXXXXXXXXXXXXXXXXXXXXXXXXXXXXXXXXXXXXXXXXXXXXXXXXXXXXXXXXXXXXXXXXXXXXXXXXXXXXXXXXXXGXYXXXYXXXXXXXXXXXXXXXXXXXXXTQXEXXXARXXFPXXDEPXXKAXFXXXXXXXXXXXXXXXXNMXXXXXXXXXXXXXXXXXXXXXXXXXXXXXXXXXXXXXXXXXXXXXXXXXXXXXXXXXXXXXXXXXXXXFXXTXXMSXYLXAXXXGXXXXXXXXXXXXXXXXXXXXXXXXXXXXXXXXXXXXXXXXXXXXXXXXXXXXXXXXXXXXXXXXXXXXYXXPXXXXXXXXXXAXXXFXXGAMENXGLXTYRXXXLLXDXXXXXXXXXXXXXXAXVXXHEXAHQWFGXLVTMXWWXXLWLNEXFAXXXXXXXXXXXXXXXPXWXXXXXXXXXXXXXXALXXDXXXXXXXXXXXXXXXXXXXXIXXXFDXXIXYXKGXXXXXMXXXXXGXXXFXXGXXXYXXXXXXXNXXXXDLWXXXXXXSGXXXXXXXXMXXWXXXXGXPXXXXXXXXXXXXXXXXXXQXXFXXXXXXXXXXXXXXXXXPXXXXXXXXXXXXXXXXXXXXXXXXXXXXXXXXXXXXXXXXXXXXXXXXXNXXXXXXXXXXYXXXXXXXXXXXXXXXXXXLXXXXXXXXXXXXXXLXXXXXXXXXXXXXXXXXXXXXXXXXXXXXXXXXXXXXXXXXXXXXXXXXXXXXXXXXXXXXXXXXXXXXXXXXGXXXXXXXXXXXXXXXXXXXXXXXXXXXXXXXXXXXXXXXXXXFXXXXXXXXXXXXXXXXXXXXXXXXXXXXXXXXXXXXXXXXXXXXXXXXXXXXXXXXXXXXXXXXXXXXXXXXXXXXXXXXXXXXXQDXXXXXXXXXXXXXXXXXXXWXXXXXXXXXXXXXXXXXXXXXXXXXXXXXXXXXXXXXXXXXXXXXF

SEQ ID NO: 919 - protein, 41 aa, Artificial sequence
  protein pattern
  Variant (2)..(2): Xaa in position 2 is any amino acid
  Variant (3)..(4): Xaa in position 3 to 4 is any or no amino acid
  Variant (6)..(6): Xaa in position 6 is any amino acid
  Variant (7)..(7): Xaa in position 7 is any or no amino acid
  Variant (10)..(10): Xaa in position 10 is Ile, Leu or Val
  Variant (17)..(17): Xaa in position 17 is Asp or Asn
  Variant (21)..(21): Xaa in position 21 is Leu or Met
  Variant (22)..(22): Xaa in position 22 is any amino acid
  Variant (23)..(23): Xaa in position 23 is Phe or Trp
  Variant (25)..(25): Xaa in position 25 is Asp, Glu or Thr
  Variant (26)..(26): Xaa in position 26 is any amino acid
  Variant (32)..(32): Xaa in position 32 is Gly or Ser
  Variant (35)..(35): Xaa in position 35 is Asn, Ser or Thr
  Variant (36)..(37): Xaa in position 36 to 37 is any amino acid
  Variant (38)..(38): Xaa in position 38 is Asp, Glu, Gly or Ser
  Variant (39)..(40): Xaa in position 39 to 40 is any amino acid
  Variant (41)..(41): Xaa in position 41 is Ala, Cys or Ser
AXXXVXXHEXAHQWFGXLVTXXXWXXLWLNEXFAXXXXXXX

SEQ ID NO: 920 - protein, 28 aa, Artificial sequence
  protein pattern
  Variant (2)..(2): Xaa in position 2 is any amino acid
  Variant (3)..(3): Xaa in position 3 is Phe, Ile or Leu
  Variant (4)..(4): Xaa in position 4 is Ala, Asp, Pro or Thr
  Variant (5)..(8): Xaa in position 5 to 8 is any amino acid
  Variant (9)..(9): Xaa in position 9 is Ile, Leu or Val
  Variant (10)..(12): Xaa in position 10 to 12 is any amino acid
  Variant (13)..(13): Xaa in position 13 is Asp or Glu
  Variant (14)..(14): Xaa in position 14 is Phe or Leu
  Variant (15)..(15): Xaa in position 15 is Ala, Asp, Glu, Gly, Ser or Thr
  Variant (16)..(16): Xaa in position 16 is any amino acid
  Variant (22)..(22): Xaa in position 22 is any amino acid
  Variant (24)..(24): Xaa in position 24 is any amino acid
  Variant (25)..(25): Xaa in position 25 is Ile or Val
  Variant (27)..(27): Xaa in position 27 is any amino acid
YXXXXXXXXXXXXXXXGAMENXGXXTXR

SEQ ID NO: 921 - protein, 57 aa, Artificial sequence
  protein pattern
  Variant (2)..(2): Xaa in position 2 is any amino acid
  Variant (3)..(3): Xaa in position 3 is any or no amino acid
  Variant (5)..(5): Xaa in position 5 is Ser or Val
  Variant (7)..(7): Xaa in position 7 is any amino acid
  Variant (10)..(12): Xaa in position 10 to 12 is any amino acid
  Variant (13)..(14): Xaa in position 13 to 14 is any or no amino acid
  Variant (16)..(16): Xaa in position 16 is Ile, Leu or Val
  Variant (17)..(17): Xaa in position 17 is Glu, Gln, Arg or Ser
  Variant (18)..(19): Xaa in position 18 to 19 is any amino acid
  Variant (20)..(20): Xaa in position 20 is Ala, Ile, Leu or Val
  Variant (22)..(24): Xaa in position 22 to 24 is any amino acid
  Variant (25)..(25): Xaa in position 25 is Phe or Leu
  Variant (26)..(27): Xaa in position 26 to 27 is any amino acid
  Variant (28)..(28): Xaa in position 28 is Ala, Gly or Ser
  Variant (29)..(29): Xaa in position 29 is Ile, Leu or Val
  Variant (30)..(31): Xaa in position 30 to 31 is any amino acid
  Variant (33)..(33): Xaa in position 33 is Phe, Ile or Leu
  Variant (34)..(39): Xaa in position 34 to 39 is any amino acid
  Variant (41)..(41): Xaa in position 41 is Ala, Gly or Thr
  Variant (42)..(44): Xaa in position 42 to 44 is any amino acid
  Variant (45)..(45): Xaa in position 45 is Asp or Ser
  Variant (46)..(46): Xaa in position 46 is Phe or Leu
  Variant (47)..(47): Xaa in position 47 is Phe or Trp
  Variant (48)..(49): Xaa in position 48 to 49 is any amino acid
  Variant (50)..(50): Xaa in position 50 is Ile or Leu
  Variant (51)..(51): Xaa in position 51 is Ala, Glu, Gly or Ser
  Variant (52)..(54): Xaa in position 52 to 54 is any amino acid
  Variant (55)..(55): Xaa in position 55 is Asp, Gly or Asn
  Variant (56)..(56): Xaa in position 56 is any amino acid
  Variant (57)..(57): Xaa in position 57 is Asp, Glu, Asn, Pro or Ser
DXXIXYXKGXXXXXMXXXXXGXXXXXXXXXXYXXXXXXXNXXXXXXXXXXXXXXXXX

SEQ ID NO: 922 - protein, 29 aa, Artificial sequence
  protein pattern
  Variant (2)..(2): Xaa in position 2 is any or no amino acid
  Variant (4)..(4): Xaa in position 4 is Phe or Met
  Variant (6)..(6): Xaa in position 6 is any amino acid
  Variant (7)..(8): Xaa in position 7 to 8 is any or no amino acid
  Variant (11)..(11): Xaa in position 11 is Glu, Gln or Arg
  Variant (12)..(12): Xaa in position 12 is any amino acid
  Variant (13)..(13): Xaa in position 13 is Phe or Ile
  Variant (15)..(15): Xaa in position 15 is Cys, Gly, Ser, Thr or Val
  Variant (16)..(16): Xaa in position 16 is any amino acid
  Variant (18)..(18): Xaa in position 18 is Glu or His
  Variant (20)..(20): Xaa in position 20 is Ala, Glu, Asn, Gln or Ser
  Variant (21)..(21): Xaa in position 21 is any amino acid
  Variant (23)..(24): Xaa in position 23 to 24 is any amino acid
  Variant (25)..(25): Xaa in position 25 is Phe, Trp or Tyr
  Variant (26)..(26): Xaa in position 26 is any amino acid
  Variant (27)..(27): Xaa in position 27 is Phe, Ile, Leu or Val
  Variant (28)..(28): Xaa in position 28 is any amino acid
  Variant (29)..(29): Xaa in position 29 is Ile, Leu, Met or Val
TXQXEXXXARXXXPXXDXPXXKXXXXXXX

SEQ ID NO: 923 - protein, 17 aa, Artificial sequence
  protein pattern
  Variant (2)..(3): Xaa in position 2 to 3 is any amino acid
  Variant (4)..(4): Xaa in position 4 is Ser or Thr
  Variant (5)..(6): Xaa in position 5 to 6 is any amino acid
  Variant (9)..(9): Xaa in position 9 is Ser or Thr
  Variant (12)..(12): Xaa in position 12 is Ile, Leu or Val
  Variant (13)..(16): Xaa in position 13 to 16 is any amino acid
  Variant (17)..(17): Xaa in position 17 is Ala, Asp or Gly
FXXXXXMSXYLXXXXXX

SEQ ID NO: 924 - protein, 26 aa, Artificial sequence
  protein pattern
  Variant (2)..(3): Xaa in position 2 to 3 is any amino acid
  Variant (4)..(5): Xaa in position 4 to 5 is any or no amino acid
  Variant (7)..(7): Xaa in position 7 is Ala, Gly or Ser
  Variant (8)..(9): Xaa in position 8 to 9 is any amino acid
  Variant (10)..(10): Xaa in position 10 is Ala, Glu, Gly, Asn, Ser or Thr
  Variant (11)..(11): Xaa in position 11 is Ser, Thr or Val
  Variant (12)..(12): Xaa in position 12 is any amino acid
  Variant (13)..(13): Xaa in position 13 is Pro or Ser
  Variant (14)..(14): Xaa in position 14 is Ile or Val
  Variant (15)..(17): Xaa in position 15 to 17 is any amino acid
  Variant (18)..(18): Xaa in position 18 is Ala, Ile, Leu or Val
  Variant (19)..(24): Xaa in position 19 to 24 is any amino acid
  Variant (25)..(25): Xaa in position 25 is Asp, Glu, Gly, Asn or Ser
  Variant (26)..(26): Xaa in position 26 is Ala, Glu, Gln, Ser or Thr
LXXXXDXXXXXXXXXXXXXXXXXXXX

SEQ ID NO: 925 - DNA, 1335 bp, Saccharomyces cerevisiae
  CDS (1)..(1335)
atgggaaagctattacaattggcattgcatccggtcgagatgaaggcagctttgaagctgaagttttgcagaacaccgctattctccatctatgatcagtccacgtctccatatctcttgcactgtttcgaactgttgaacttgacctccagatcgtttgctgctgtgatcagagagctgcatccagaattgagaaactgtgttactctcttttatttgattttaagggctttggataccatcgaagacgatatgtccatcgaacacgatttgaaaattgacttgttgcgtcacttccacgagaaattgttgttaactaaatggagtttcgacggaaatgcccccgatgtgaaggacagagccgttttgacagatttcgaatcgattcttattgaattccacaaattgaaaccagaatatcaagaagtcatcaaggagatcaccgagaaaatgggtaatggtatggccgactacatcttagatgaaaattacaacttgaatgggttgcaaaccgtccacgactacgacgtgtactgtcactacgtagctggtttggtcggtgatggtttgacccgtttgattgtcattgccaagtttgccaacgaatctttgtattctaatgagcaattgtatgaaagcatgggtcttttcctacaaaaaaccaacatcatcagagattacaatgaagatttggtcgatggtagatccttctggcccaaggaaatctggtcacaatacgctcctcagttgaaggacttcatgaaacctgaaaacgaacaactggggttggactgtataaaccacctcgtcttaaacgcattgagtcatgttatcgatgtgttgacttatttggccggtatccacgagcaatccactttccaattttgtgccattccccaagttatggccattgcaaccttggctttggtattcaacaaccgtgaagtgctacatggcaatgtaaagattcgtaagggtactacctgctatttaattttgaaatcaaggactttgcgtggctgtgtcgagatttttgactattacttacgtgatatcaaatctaaattggctgtgcaagatccaaatttcttaaaattgaacattcaaatctccaagatcgaacagtttatggaagaaatgtaccaggataaattacctcctaacgtgaagccaaatgaaactccaattttcttgaaagttaaagaaagatccagatacgatgatgaattggttccaacccaacaagaagaagagtacaagttcaatatggttttatctatcatcttgtccgttcttcttgggttttattatatatacactttacacagagcgtga

SEQ ID NO: 926 - protein, 444 aa, Saccharomyces cerevisiae
MGKLLQLALHPVEMKAALKLKFCRTPLFSIYDQSTSPYLLHCFELLNLTSRSFAAVIRELHPELRNCVTLFYLILRALDTIEDDMSIEHDLKIDLLRHFHEKLLLTKWSFDGNAPDVKDRAVLTDFESILIEFHKLKPEYQEVIKEITEKMGNGMADYILDENYNLNGLQTVHDYDVYCHYVAGLVGDGLTRLIVIAKFANESLYSNEQLYESMGLFLQKTNIIRDYNEDLVDGRSFWPKEIWSQYAPQLKDFMKPENEQLGLDCINHLVLNALSHVIDVLTYLAGIHEQSTFQFCAIPQVMAIATLALVFNNREVLHGNVKIRKGTTCYLILKSRTLRGCVEIFDYYLRDIKSKLAVQDPNFLKLNIQISKIEQFMEEMYQDKLPPNVKPNETPIFLKVKERSRYDDELVPTQQEEEYKFNMVLSIILSVLLGFYYIYTLHRA

SEQ ID NO: 927 - DNA, 1212 bp, Oryza sativa (japonica cultivar-group)
  CDS (1)..(1212)
atgggggtgctgtcgaggccggaggaggtgttgccgctggtgaagctgcgggtggcggcggggcggatcaagcggcagatcccgccggaggagcactgggccttcgcctacaccatgctgcagagggtctcccggagcttcgcgctcgtcatccagcagctcggccccgacctccgcaatgccgtgtgcatcttctatctcgtgctccgagccctcgacactgttgaggacgacactagcattcctgccgcggtgaaggtgccgatccttaaggaattccatcggcatatctacaaccgcgactggcattattcatgtggaacaaaagactacaaattactgatggataagtttcgccttgtctccacggctttcttggagcttggtcaaggttatcaagaggcaattgaagaaatcactaggctaatgggagcaggaatggcaaaatttatctgcaaggaggttgaaactgttgatgactacaatgagtactgtcactatgtagcagggctagtggggtatgggctttccaggctctttcatgctggtgggacggaagatctggcttcagattcactttcaaattcaatgggcttgtttctgcagaaaatcaatataattagggattatttggaggacataaacgagataccaaagtcacgtatgttctggcctcgagaaatatggagtaaatatgtcaataaactcgaggatttgaaatacgaggaaaattcagaaaaggcagttcagtgtttgaatgatatggtgactaacgctctgtctcatgctgaagactgcctccaatacatgtcagcattgaaggatcatgccattttccgtttttgtgcaatacctcagataatggcaattgggacatgtgctatttgctacaataatgtgaatgtctttagaggagttgttaagatgaggcgtgggctcactgcacgagtaattgatgagacaaacacaatgtcagatgtctatactgctttctatgagttctcttcgctgatagaatcgaagattgataataatgatccaaatgcttccctaacgcggaaacgtgttgatgcgataaagagaacctgcaagtcatcttgctcactaaagagaaggggatacgatttggagaagtcaaagtacaactccatgctgataatggttgtacttctgttggtggctattgttttgggcatgatatatgccaagtga

SEQ ID NO: 928 - protein, 403 aa, Oryza sativa (japonica cultivar-group)
MGVLSRPEEVLPLVKLRVAAGRIKRQIPPEEHWAFAYTMLQRVSRSFALVIQQLGPDLRNAVCIFYLVLRALDTVEDDTSIPAAVKVPILKEFHRHIYNRDWHYSCGTKDYKLLMDKFRLVSTAFLELGQGYQEAIEEITRLMGAGMAKFICKEVETVDDYNEYCHYVAGLVGYGLSRLFHAGGTEDLASDSLSNSMGLFLQKINIIRDYLEDINEIPKSRMFWPREIWSKYVNKLEDLKYEENSEKAVQCLNDMVTNALSHAEDCLQYMSALKDHAIFRFCAIPQIMAIGTCAICYNNVNVFRGVVKMRRGLTARVIDETNTMSDVYTAFYEFSSLIESKIDNNDPNASLTRKRVDAIKRTCKSSCSLKRRGYDLEKSKYNSMLIMVVLLLVAIVLGMIYAK

SEQ ID NO: 929 - DNA, 1233 bp, Oryza sativa (japonica cultivar-group)
  CDS (1)..(1233)
atgggggtggtgggggcgttgctgggaccggaggcggaggcgctggtgaggctgcgggcggcggcgtggcggctgcggagggaggtcgccgccgccaccgacgacgacgagcactgggccttcgcctactccatgctgcaccgcgtctcccgcagcttcgccatcgtcatccagcagctcggccccgacctccgcaatgccgtgtgcgtcttctacctcgtgcttcgggcgctcgacaccgtcgaagatgatactagcatccctactgagattaaggtgcccattcttcaggaattccaccgtcatatctataaccgggattggcatttctcatgtggaacaaaggactgcaagattctgatggataaattccactatgttttgacagctttcttggagcttggttcaggataccaagaggcaattgaagaaattaccaggagaatgggtgcaggaatggcaaagtttatatgcaaggaggttgaaactgttgatgattatgatgagtactgtcactatgtggcagggctagtcggcattggactttcaaggctctttcatgctgctgggttagaagatcttgctcccgaatcgctttctaattcaatgggtttatttttgcagaaagtcaatattactcgggattacctggaggacataaatgagataccaaaatcacgcatgttctggccacgagaaatatggagtaaatatgttgacaaacttgaggatctcaaatacgaaaataattcagtgaaggcagtaaaatgcttgaatgagatggtgactaatggtttaatacatactgaagattgccttcggtatatgtctgctctaaaggatattactattctccgtttttgtgcaataccccaggtaatggcacttgcaacctatgctctgtgctataacaatgtgaatgtatttcgaggagttgtgaagttgaggcgtgggctgactgcacgaataatcaatgaaacaaattctatggctgatgtgtacactgctttctatgaattctcttcactgcttgcagaaaagattgatgataatgatccaaatgcgtcgcttacacggaaacgtgtgaatgcaataaaggagacctgcaaatcatccggtttgctgaagataaggggatatgacttggataggccaaaaaggaaccctgctatgatcatgatgctactgctgctcttggtagctattttcttgggagctctgtataggaggtga

SEQ ID NO: 930 - protein, 410 aa, Oryza sativa (japonica cultivar-group)
MGVVGALLGPEAEALVRLRAAAWRLRREVAAATDDDEHWAFAYSMLHRVSRSFAIVIQQLGPDLRNAVCVFYLVLRALDTVEDDTSIPTEIKVPILQEFHRHIYNRDWHFSCGTKDCKILMDKFHYVLTAFLELGSGYQEAIEEITRRMGAGMAKFICKEVETVDDYDEYCHYVAGLVGIGLSRLFHAAGLEDLAPESLSNSMGLFLQKVNITRDYLEDINEIPKSRMFWPREIWSKYVDKLEDLKYENNSVKAVKCLNEMVTNGLIHTEDCLRYMSALKDITILRFCAIPQVMALATYALCYNNVNVFRGVVKLRRGLTARIINETNSMADVYTAFYEFSSLLAEKIDDNDPNASLTRKRVNAIKETCKSSGLLKIRGYDLDRPKRNPAMIMMLLLLLVAIFLGALYRR

SEQ ID NO: 931 - DNA, 1398 bp, Magnaporthe grisea 70-15
  CDS (1)..(1398)
atgggtaccgtgaagaacattgcatactatgcattccacccggttgagctccgggcaattatccagtggaagatatggcacgagcctgttcacacccgcaaccccagcaaagagcgccccacagagacggaatgcttcaagtatctcgatttgacatcccgcagcttcgcggccgtcatcaaggagttgaacccggagctcctgatgccagtttgcatcttttaccttgccctgcgcggccttgacaccatcgaagatgacatgaccatcccgaacgacaagaagatcccgctgcttcgcaactttgccgactttatggaccaggatggctggaccttcaacgagaacggccccaacgagagggatcgcgaactccttgtgcactttgaccaagtcatcacagagctcaagctcgtcaagaagccctactacgaaatcatccgcgacatcacggtcaagatgggtaacggcatggccgactatgtcctcaagacggagaacacgaccaactgcatcaacacggtcgaggagtacgaaatgtattgccactatgtcgcgggtcttgtcggcgagggtctcacccggctgttcgtcgtcgccgagctggccaaccccaagctcctcgagcgaatggaccttgccgagtccatggggcagttcctgcaaaagacaaacatcatccgagacgtacacgaggactatatcgacaagcgcagttggtggcctcgctcggtctggagcaagtacgccaaggagtacgacgatctcttcaagcccgagaaccgacagcaggcggtttactgctgttccgagctggtcttgaacgccctcaagaacgtcgaggactgtttatattacatggctggcatgcgcgagcagtcggtgttcaactttgtggccattccgcagaccatggccattgcgacgttggagctcgtgttccagaaccccaagatattcgagcgtaacgtcaagatcacaaagggcgatgcctgccggatcatgctgaggtcaacgcagaacctgaggctggtcacggatctcttcaaggagtacacccgaaagatacatcagaagaacgacccccgtgatccaaactacgccgctatcagcgcacaatgtggaaagattgagcagttcatcgagacgatattcccgtcgcaagatcccaaggttctcgagatggcacagaaggacgtcaagatgtcggaaaagccaggcatggacacatccgaggctgtcgtacttatcctggctgtgatcgccatgtttgtgttttcgggagggctgatggttggtctcgcttggctcatgggtgcccagttcaacaacttcttcagcagtatcgacgccggcatgaagccgtcgccactaccgtcaggtcaccaggagctctga

SEQ ID NO: 932 - protein, 465 aa, Magnaporthe grisea 70-15
MGTVKNIAYYAFHPVELRAIIQWKIWHEPVHTRNPSKERPTETECFKYLDLTSRSFAAVIKELNPELLMPVCIFYLALRGLDTIEDDMTIPNDKKIPLLRNFADFMDQDGWTFNENGPNERDRELLVHFDQVITELKLVKKPYYEIIRDITVKMGNGMADYVLKTENTTNCINTVEEYEMYCHYVAGLVGEGLTRLFVVAELANPKLLERMDLAESMGQFLQKTNIIRDVHEDYIDKRSWWPRSVWSKYAKEYDDLFKPENRQQAVYCCSELVLNALKNVEDCLYYMAGMREQSVFNFVAIPQTMAIATLELVFQNPKIFERNVKITKGDACRIMLRSTQNLRLVTDLFKEYTRKIHQKNDPRDPNYAAISAQCGKIEQFIETIFPSQDPKVLEMAQKDVKMSEKPGMDTSEAVVLILAVIAMFVFSGGLMVGLAWLMGAQFNNFFSSIDAGMKPSPLPSGHQEL

SEQ ID NO: 933 - DNA, 1389 bp, Gibberella zeae PH-1
  CDS (1)..(1389)
atgggttacctttactaccttctacacccttaccagcttcggtccattattcaatggaaggtctggcatgatcccgtccacgagcgcgatcccagcaccgagtcaccagagctgcaagaatgcttccgttacctcaacttgacaagtcgcagttttgcggctgtcattcaagagcttaaccacgaactcctcgtccccatcactctcttctacctctgcctccgtggcctagacaccatcgaggatgacatgaccttgccactagagaagaagatccctattcttcgaaacttccataccactatgaacgaggatggttggcaatttcatgagagtcaagagaaggacaaggagctgctggagcactttgatgttgttatcaccgagctcaagaagatcaaggccccctatcacgagatcatcacagacatgactcgcaagatgggtaacggcatggctgactacgccgagaacgaggagatgatcaagaatggtgtgcagacgattgaggagtacgaattgtactgccattacgttgctggtctcgtcggtgaaggcctaacacgcctctttgtcgaatccgagcttgccaaccccaagcttgccgagcgtccttctcttacagagtcaatgggtcagttcctccagaagacaaacatcattcgagatcttcacgaggactggcaagacggccgaaggtggtaccccaaggagatctggagccagcacgttgataagtgggaagacatgttcaaccctgcccaacaaacaaaggctatcgagtgtgtctcccacatggtcctcgacgcactaaagcactccgaggagtgcctcttctacatggcgggcatcaaggaccagagtgtgtttaactttgttgccattcccgaaggcatggctattgccacattggaactcgtcttccgcaaccctgaggttctcaagaggaacgtcaagatcacaaagggcgatgcctgcaagatcatgttcgaatgcacccagaacctctttaccgtgtgtgaggtcttcaagcgatatacccgaaagatcgccaagaaaaatgaccctcgcgaccccaacttccttgccatcagtgctcaatgtgcaaagatcgagcaatttatcgagaccctgttccctaagcaagatcccaagaagctcactcttacccaagcccaagcacaaaacaaggagcccaccatggatgctggcgaggccgttgttctcttcggtgttgtcattgcagccttggtctgtatttcgggtctcatgcttggtaccgcttggttctttggagccaggttcgatcacatctttagggaagccagcgttttcctaccgggtcgcgaaaaggccacccccatgattacgggtcacgaagaattgtag

SEQ ID NO: 934 - protein, 462 aa, Gibberella zeae PH-1
MGYLYYLLHPYQLRSIIQWKVWHDPVHERDPSTESPELQECFRYLNLTSRSFAAVIQELNHELLVPITLFYLCLRGLDTIEDDMTLPLEKKIPILRNFHTTMNEDGWQFHESQEKDKELLEHFDVVITELKKIKAPYHEIITDMTRKMGNGMADYAENEEMIKNGVQTIEEYELYCHYVAGLVGEGLTRLFVESELANPKLAERPSLTESMGQFLQKTNIIRDLHEDWQDGRRWYPKEIWSQHVDKWEDMFNPAQQTKAIECVSHMVLDALKHSEECLFYMAGIKDQSVFNFVAIPEGMAIATLELVFRNPEVLKRNVKITKGDACKIMFECTQNLFTVCEVFKRYTRKIAKKNDPRDPNFLAISAQCAKIEQFIETLFPKQDPKKLTLTQAQAQNKEPTMDAGEAVVLFGVVIAALVCISGLMLGTAWFFGARFDHIFREASVFLPGREKATPMITGHEEL

SEQ ID NO: 935 - DNA, 1326 bp, Kluyveromyces lactis NRRL Y-1140
  CDS (1)..(1326)
atggggaaagttgctgaattactttcgcatccacttgaattgaaagcagccttaaaattgaagtttttgagaaagccattatttccagatgtcgtgattgaagaatctgccgatcttacgagatgccacgagcttttgaagttgacttccaggtcttttgctgcagtgattatggaacttcatcctgaattgcgtaatgccgtcatgcttttttatttggttttgagggctttggatactgtggaagatgatatgactatcgatccaaagatcaaaatcccagtattgcgtgaatttgactctaagttagatctaccatcatggtactttgacggtaatggccctaatgaaaaggatcgtgctgtattggtcgatttcccatgtattttgaacgaattgcacaaattgaaaccagaataccaaagagtgattaaggaaattacgggcaagatgggtaacggtatggctgattacatcttggatgagaatttcaatctgaatggactacaaactgttgcggattacgatctatattgtcattacgttgcaggtcttgtgggagatgggttgacacaaatgttagttttggctggttttggctccaatgatttatatgatgaaaacgttcatctatatgaagatatgggactctttttgcaaaagacaaatattatcagagattacgccgaagaccttgctgatggtcgttcgttctggccaaaggaaatatggtcgttatacgccgagaaactttccgactttgctaagccagaaaacacccaacaagggctatattgtatcaaccacctcgttttgaatgctatgacccatatcgaaagtgtactacactatttggcttctattcatgaacagtcttctttccaattttgtgccattcctcaggtaatggccattgcaactctttctctggtgtttgcaaaccctaaagtcatgcatgagaatgttaagatcagaaaggggactacatgctatctaattcttaaatcaaggacactaaggggttgcgtagagattttccaatattacctccgtgatattaaaaagcgactaacagtggaagacccaagctatctaaagctaaacatccaaatctcaaagattgagcaatatatcgagtccatgtaccaggaacaattgccattgggtgtgaaaccacaagaaactttgatttacaaaaaagtgttggatagaactgaatatgactcgaaggttgcagtcattgaagaagatgaagagtttaaattcaatctcggttttacaatgttcctcacttttatcgccgctgtctatttctactccaaataa

SEQ ID NO: 936 - protein, 441 aa, Kluyveromyces lactis NRRL Y-1140
MGKVAELLSHPLELKAALKLKFLRKPLFPDVVIEESADLTRCHELLKLTSRSFAAVIMELHPELRNAVMLFYLVLRALDTVEDDMTIDPKIKIPVLREFDSKLDLPSWYFDGNGPNEKDRAVLVDFPCILNELHKLKPEYQRVIKEITGKMGNGMADYILDENFNLNGLQTVADYDLYCHYVAGLVGDGLTQMLVLAGFGSNDLYDENVHLYEDMGLFLQKTNIIRDYAEDLADGRSFWPKEIWSLYAEKLSDFAKPENTQQGLYCINHLVLNAMTHIESVLHYLASIHEQSSFQFCAIPQVMAIATLSLVFANPKVMHENVKIRKGTTCYLILKSRTLRGCVEIFQYYLRDIKKRLTVEDPSYLKLNIQISKIEQYIESMYQEQLPLGVKPQETLIYKKVLDRTEYDSKVAVIEEDEEFKFNLGFTMFLTFIAAVYFYSK

SEQ ID NO: 937 - DNA, 1344 bp, Debaryomyces hansenii CBS767
  CDS (1)..(1344)
atgggtaaatttgtccaattgctctctcatccaactgagttgaaagctgtcatccaattgatgtatttcagacagccgttgcacccacaaggtgcatcgagccaatcccaagcatctaaaaggtgctatgagttgttaaacataacgtcacggtctttcgctgcagttattcaagaattacatccagaattgagagatgccgtgatgttattttatttgattttaagagcattagatactgttgaggatgacatgactattgagcctgaaatcaaggttccgttattaagaacattccatgataagttaaatttgaaagaatggtcatttgatggaaatagtaagactgagaaagacagatgtgtgttggttgagttcccgtgcattttaacggaatatcacaagttgaaggaagattatcaagatataattaagcatattactaaggaaatgggtaatggtatggcagactacatcttggatgataatttcaatgttaatggtgtagccacggttagagaatacgatttatactgtcattacgttgcaggtttagtgggtgaaggattgaccaaattgatggtgttggcaggtttttctgataacagcctttcccaagataattttgcgaagtcggaatccatgggattatttttgcaaaaaaccaatataattagagactaccatgaagatttggaagacggaagatcattctggcctaaagaaatctgggaaaagcatacctcatctttaccgtcatttcataaagatacatctttagaaagtcaaggacatggattagcctgtatcaacgaattagtcttgaatgccttatgtcatgtcaaagacgttttgacgtatttgtcgttagtaagggacccttcgtgtttcaatttctgtgctataccccaagtaatggctatttctactttagctttggtgtacaataacccaaatgttcttcatggaaatgttaaaataagaaaaggtactacttgcgggttgatccttaatagccgtacattacctggggttgtgaaaatcttcaagcattacgtacaagtaattaatcataagtcatctgttcaagatccaaactatttaaagattggtattaaatgtggtgaaatcgaacaattttgcgagttgatgtacccttcagaatatgctattccaaaaggagtagtaaagcaaaagcaggagattaaccacaatatcttagaaagagccagtgttgatgatcaagttgctgaaactgttaatttagaagaaaccaaatgtaatttagctgtgggaataagtcttttagtcgttgttgttgtcgtagcttattttatacattag

SEQ ID NO: 938 - protein, 447 aa, Debaryomyces hansenii CBS767
MGKFVQLLSHPTELKAVIQLMYFRQPLHPQGASSQSQASKRCYELLNITSRSFAAVIQELHPELRDAVMLFYLILRALDTVEDDMTIEPEIKVPLLRTFHDKLNLKEWSFDGNSKTEKDRCVLVEFPCILTEYHKLKEDYQDIIKHITKEMGNGMADYILDDNFNVNGVATVREYDLYCHYVAGLVGEGLTKLMVLAGFSDNSLSQDNFAKSESMGLFLQKTNIIRDYHEDLEDGRSFWPKEIWEKHTSSLPSFHKDTSLESQGHGLACINELVLNALCHVKDVLTYLSLVRDPSCFNFCAIPQVMAISTLALVYNNPNVLHGNVKIRKGTTCGLILNSRTLPGVVKIFKHYVQVINHKSSVQDPNYLKIGIKCGEIEQFCELMYPSEYAIPKGVVKQKQEINHNILERASVDDQVAETVNLEETKCNLAVGISLLVVVVVVAYFIH

SEQ ID NO: 939 - DNA, 1347 bp, Candida albicans SC5314
  CDS (1)..(1347): transl_table=12
atgggcaaatttttacaattattatcacatcctactgaacttaaagcagttatacaactttttggatttagacaaccattacatccaggtaaaagagatgttaatgataaagaattggttagatgttatgaattattgaatctaacttcaagatcatttgctgctgtcattgaagaattacatccagaattacgtgatgcggtgatgatcttttatcttgtattaagagcattagatactattgaagatgatatgacgattaaatcatcaattaaaatccctttgttgcgtgaatttgatactaaattgaatactaaaaattggacatttgatggtaatggacccaatgaaaaagatcgaactgttttagttgaatttgataagattttgaatgtttatcatagattaaaacctcaatatcaagatattattaaaagtattacttttaaaatgggtaatggtatggcagattatattttagatgaagaatttaatgttaatggtgttgccaccgttgaagattataatttatattgtcattatgttgctggattagtaggtgaaggtttaactaatctttttgtattggctaattttggtgataaaacattgacagaaaataattttgctaaagctgattccatgggattatttttacaaaaaacaaatattattagagattatcatgaagatttacaagatggtagaagtttttggcctcgagaaatttggtctaaatatactgaaaatttacaagatttccataaagtaaaaacccctgccaaagaatttgctggagtaagttgtattaatgaattagttttaaatgcattgggtcatgtcactgattgtcttgattatttatcattagttaaagatccttcttcattctcattttgtgctattcctcaagtaatggcagtggctactttagctgaagtttataataatcctaaagttttacatggagtggtcaaaattagaaaaggtactacttgtagattgatattagaaagtagaacattaccaggggttgtcaagattttcaaagaatatattcaagtgattaatcataaatcatcagttagagatccaaattatttgaagattgggattaaatgtggtgaaattgaacaatattgtgaaatgatatatccaaacaaacaagctttacctccaagtatgaaatcattaccagaaaataaatttaccaagattgttgctagtagagaaagtattgatttatctgtacaaagaagaattgaacaagaaaatttcaattgtaatgttgtgttatttggtattggtgctttaattttaagtttaatttattttgtcctttattga

SEQ ID NO: 940 - protein, 448 aa, Candida albicans SC5314
MGKFLQLLSHPTELKAVIQLFGFRQPLHPGKRDVNDKELVRCYELLNLTSRSFAAVIEELHPELRDAVMIFYLVLRALDTIEDDMTIKSSIKIPLLREFDTKLNTKNWTFDGNGPNEKDRTVLVEFDKILNVYHRLKPQYQDIIKSITFKMGNGMADYILDEEFNVNGVATVEDYNLYCHYVAGLVGEGLTNLFVLANFGDKTLTENNFAKADSMGLFLQKTNIIRDYHEDLQDGRSFWPREIWSKYTENLQDFHKVKTPAKEFAGVSCINELVLNALGHVTDCLDYLSLVKDPSSFSFCAIPQVMAVATLAEVYNNPKVLHGVVKIRKGTTCRLILESRTLPGVVKIFKEYIQVINHKSSVRDPNYLKIGIKCGEIEQYCEMIYPNKQALPPSMKSLPENKFTKIVASRESIDLSVQRRIEQENFNCNVVLFGIGALILSLIYFVLY

SEQ ID NO: 941 - DNA, 1572 bp, Cryptococcus neoformans var. neoformans B-3501A
  CDS (1)..(1572)
atgcgttcgcgtcctgcttccgcccgtctgcacaacattcatactccttcactctctatacagcccacatcccatcttttctttgtatacatcacaaaaatgggcatagtaaacaatattgtgacgggcgtcacccaccccatggagcttcgggccattgtcaattttgccatttggcacgacactagggatatcactgatactgtcgagctgccgacgacccattatgaccgaccgaccatgcgaaaatgctgggatttcctcgatttgaccagtaggagttttgcaagggtcatcagggagctggaaggagaacttgccaggactgtttgtctgttctatcttgtgctccgtgcactggacaccgtcgaggatgacatgaccatccccaacgatgtaaagattcctcttcttcgcgcgatgcacaccaagctttacgagcctggatggacattcaaggagtcaaaggaaaaggacaagattgtcttggaggagttcgacgctattcaaacagagttttctttgctcgaccacaagtaccagactgtcattgccgatatttgcaagaagatgggtgctggtatggccgactttgccgcccttgctacccccgggaaacctgtagctgaaatcaactccattgccgactacgacctttactgtcactacgtcgctggtctcgtcggcgaaggtctttctggtttgttcgctgcctctggcaaggaacgctcttttatcgccgatcaacttactctttccaactctatgggcctccttctccagaagactaacatctaccgtgacttgcacgaggacgttatcgacggccgaggcttttggcctcgggccatctggtcaaagtatggtttcaactctatgaaggagttgattgaccctgaaagggagactgaggcaatgtgggcagcgagcgaaatggtgctcgatgcgttgagacatgctacggacgctttggactacttgacgctgttgaggtgccagagtgtgttcaacttcgtggcgatccctgctgtcatggccattgcgactttggagaggacattcatgaacaagaagatcttgaaagaaaatgtgaagatcaggaagggagaaactctcaggctgatcatgcgagcaatgaaccctcgtgacgtgtcttacattttccgagagtacgcccgcaagattcacgcgaaagtgcacaaagacgaccccaacctcctcaaactttccattgcttgtggcaagattgagcaatgggctgaacaccactacccctcatttatccagatcggcaacgccgcaggcaatggcgtccagtctgccattgatcccgctgcgatcaaggcccgtcaagaaaagttcatggccgaccttcgcgccaaggggctcatcaaggagaagagcggtgaaactgatggtgatgaagaggccaagaagcgatacgaggcgattcaaaatgaacaggccgtatcttggctcatgatcattggtgtcattgtcggtatgttggcattaatggctgctatgggaggtattgttgtttgggttattctgacagtgtacgatgagtaa

SEQ ID NO: 942 - protein, 523 aa, Cryptococcus neoformans var. neoformans B-3501A
MRSRPASARLHNIHTPSLSIQPTSHLFFVYITKMGIVNNIVTGVTHPMELRAIVNFAIWHDTRDITDTVELPTTHYDRPTMRKCWDFLDLTSRSFARVIRELEGELARTVCLFYLVLRALDTVEDDMTIPNDVKIPLLRAMHTKLYEPGWTFKESKEKDKIVLEEFDAIQTEFSLLDHKYQTVIADICKKMGAGMADFAALATPGKPVAEINSIADYDLYCHYVAGLVGEGLSGLFAASGKERSFIADQLTLSNSMGLLLQKTNIYRDLHEDVIDGRGFWPRAIWSKYGFNSMKELIDPERETEAMWAASEMVLDALRHATDALDYLTLLRCQSVFNFVAIPAVMAIATLERTFMNKKILKENVKIRKGETLRLIMRAMNPRDVSYIFREYARKIHAKVHKDDPNLLKLSIACGKIEQWAEHHYPSFIQIGNAAGNGVQSAIDPAAIKARQEKFMADLRAKGLIKEKSGETDGDEEAKKRYEAIQNEQAVSWLMIIGVIVGMLALMAAMGGIVVWVILTVYDE

SEQ ID NO: 943 - DNA, 1629 bp, Cryptococcus neoformans var. neoformans B-3501A
  CDS (1)..(1629)
atgcgttcgcgtcctgcttccgcccgtctgcacaacattcatactccttcactctctatacagcccacatcccatcttttctttgtatacatcacaaaaatgggcatagtaaacaatattgtgacgggcgtcacccaccccatggagcttcgggccattgtcaattttgccatttggcacgacactagggatatcactgatactgtcgagctgccgacgacccattatgaccgaccgaccatgcgaaaatgctgggatttcctcgatttgaccagtaggagttttgcaagggtcatcagggagctggaaggagaacttgccaggactgtttgtctgttctatcttgtgctccgtgcactggacaccgtcgaggatgacatgaccatccccaacgatgtaaagattcctcttcttcgcgcgatgcacaccaagctttacgagcctggatggacattcaaggagtcaaaggaaaaggacaagattgtcttggaggagttcgacgctattcaaacagagttttctttgctcgaccacaagtaccagactgtcattgccgatatttgcaagaagatgggtgctggtatggccgactttgccgcccttgctacccccgggaaacctgtagctgaaatcaactccattgccgactacgacctttactgtcactacgtcgctggtctcgtcggcgaaggtctttctggtttgttcgctgcctctggcaaggaacgctcttttatcgccgatcaacttactctttccaactctatgggcctccttctccagaagactaacatctaccgtgacttgcacgaggacgttatcgacggccgaggcttttggcctcgggccatctggtcaaagtatggtttcaactctatgaaggagttgattgaccctgaaagggagactgaggcaatgtgggcagcgagcgaaatggtgctcgatgcgttgagacatgctacggacgctttggactacttgacgctgttgaggtgccagagtgtgttcaacttcgtggcgatccctgctgtcatggccattgcgactttggagaggacattcatgaacaagaagatcttgaaagaaaatgtgaagatcaggaagggagaaactctcaggctgatcatgcgagcaatgaaccctcgtgacgtgtcttacattttccgagagtacgcccgcaagattcacgcgaaagtgcacaaagacgaccccaacctcctcaaactttccattgcttgtggcaagattgagcaatgggctgaacaccactacccctcatttatccagatcggcaacgccgcaggcaatggcgtccagtctgccattgatcccgttagtaacgatgcacgtgcagccttattcacgcgtctcgctaaggaggcacaagaggctgcgatcaaggcccgtcaagaaaagttcatggccgaccttcgcgccaaggggctcatcaaggagaagagcggtgaaactgatggtgatgaagaggccaagaagcgatacgaggcgattcaaaatgaacaggccgtatcttggctcatgatcattggtgtcattgtcggtatgttggcattaatggctgctatgggaggtattgttgtttgggttattctgacagtgtacgatgagtaa

SEQ ID NO: 944 - protein, 542 aa, Cryptococcus neoformans var. neoformans B-3501A
MRSRPASARLHNIHTPSLSIQPTSHLFFVYITKMGIVNNIVTGVTHPMELRAIVNFAIWHDTRDITDTVELPTTHYDRPTMRKCWDFLDLTSRSFARVIRELEGELARTVCLFYLVLRALDTVEDDMTIPNDVKIPLLRAMHTKLYEPGWTFKESKEKDKIVLEEFDAIQTEFSLLDHKYQTVIADICKKMGAGMADFAALATPGKPVAEINSIADYDLYCHYVAGLVGEGLSGLFAASGKERSFIADQLTLSNSMGLLLQKTNIYRDLHEDVIDGRGFWPRAIWSKYGFNSMKELIDPERETEAMWAASEMVLDALRHATDALDYLTLLRCQSVFNFVAIPAVMAIATLERTFMNKKILKENVKIRKGETLRLIMRAMNPRDVSYIFREYARKIHAKVHKDDPNLLKLSIACGKIEQWAEHHYPSFIQIGNAAGNGVQSAIDPVSNDARAALFTRLAKEAQEAAIKARQEKFMADLRAKGLIKEKSGETDGDEEAKKRYEAIQNEQAVSWLMIIGVIVGMLALMAAMGGIVVWVILTVYDE

SEQ ID NO: 945 - DNA, 1404 bp, Ganoderma lucidum
  CDS (1)..(1404)
atgggcgcgacgtctatgctcaccctcctcctcacacaccccttcgagttccgcgtcctcatccaatacaagctctggcacgaaccaaaacgcgacattacccaagtctccgagcacccgacttcaggatgggaccgccctactatgcgacggtgttgggagttccttgaccagaccagccggagtttctctggggtcatcaaggaagtggagggtgatttagcaagagtgatctgcttattctacctggtgctacgaggcctggacacgatcgaagatgacatgacgcttcctgacgagaaaaaacaacccatactccgacaattccacaaactcgccgtgaagcccggttggacattcgacgagtgtggacccaaagaaaaggacaggcaactcctcgtcgagtggacagttgtcagcgaagagctcaaccgtctcgacgcatgctaccgcgatattattatcgacattgcggaaaagatgcagaccgggatggccgactacgcgcataaagcagcgaccacgaattcgatttacatcggaaccgtcgacgagtacaacctctactgccactacgtcgccggcctcgtcggcgagggcctcacgcgcttctgggccgcgtccggcaaggaggcggaatggctgggggaccagctcgagctgacgaacgcgatgggcctcatgctgcagaagacgaacattatccgtgacttccgcgaggacgccgaggagcgccgcttcttctggccgcgcgagatctgggggcgcgacgcatacggcaaggccgtcggccgcgcgaacgggttccgcgagatgcacgagctgtacgagcggggcaacgagaagcaggcgctgtgggtgcagagcgggatggtcgttgacgtgctcgggcacgctacagactcgctcgactatctccgcctactcacgaagcagagcatcttctgcttctgtgcgatcccacaaacgatggccatggccaccctcagcttgtgcttcatgaactacgacatgttccacaaccatatcaagatccgcagggctgaggctgcctcgcttattatgcggtcaacgaacccccgcgacgtcgcatacattttccgcgactacgcgcgcaagatgcacgcccgcgcgctgcccgaggacccctccttcctccgcctctccgtcgcgtgcggcaagatcgagcagtggtgcgagcgccactacccctcctttgtccgcctccagcaggtctcgggtgggggcatcgtgttcgacccgagcgacgcgcgcaccaaggtcgtcgaggccgcgcaggcccgcgacaacgagctcgcgcgcgagaagcgcctggccgagctccgtgacaagactggaaagcttgagcgcaagctgcggtggagtcaagccccatcgagctga

SEQ ID NO: 946 - protein, 467 aa, Ganoderma lucidum
MGATSMLTLLLTHPFEFRVLIQYKLWHEPKRDITQVSEHPTSGWDRPTMRRCWEFLDQTSRSFSGVIKEVEGDLARVICLFYLVLRGLDTIEDDMTLPDEKKQPILRQFHKLAVKPGWTFDECGPKEKDRQLLVEWTVVSEELNRLDACYRDIIIDIAEKMQTGMADYAHKAATTNSIYIGTVDEYNLYCHYVAGLVGEGLTRFWAASGKEAEWLGDQLELTNAMGLMLQKTNIIRDFREDAEERRFFWPREIWGRDAYGKAVGRANGFREMHELYERGNEKQALWVQSGMVVDVLGHATDSLDYLRLLTKQSIFCFCAIPQTMAMATLSLCFMNYDMFHNHIKIRRAEAASLIMRSTNPRDVAYIFRDYARKMHARALPEDPSFLRLSVACGKIEQWCERHYPSFVRLQQVSGGGIVFDPSDARTKVVEAAQARDNELAREKRLAELRDKTGKLERKLRWSQAPSS

SEQ ID NO: 947 - DNA, 1497 bp, Panax quinquefolius
  CDS (1)..(1248)
atgggaagtttgggggcaattctgaagcatccggacgatttctatccattgttgaagctcaaaatagcggcgaggcatgcggaaaaacagattccttcggagccacactgggctttctgttactctatgcttcataaggtttctcgaagcttcggtctcgtcattcaacagctcggacctcagcttcgcgatgctgtatgcattttttatttggttcttcgagcacttgacactgttgaggatgacacaagcatatctacagaggttaaagtaccaatattgatggcttttcatcgccacatatatgataacgactggcacttttcatgtggtacgaaggaatacaaagttctcatggatgaattccatcatgtttctaatgcttttctggatcttgggagcggttacaaggaggcaatagaagatattacaatgagaatgggtgcaggaatggcaaaatttatatgcaaggaggtggagacaattgatgattatgatgaatattgtcactatgtggcaggactagttggattagggttgtcaaagctcttccatgcctctggggcagaagatttggctacagattctctgtccaattcaatgggtttatttctccagaagacaaacattattcgagattatctggaggacataaatgagataccaaagtcacgcatgttttggcctcgccagatttggagtaaatatgtcgataaacttgaggacttaaaatatgaggaaaactcagggaaggcagtgcagtgcctgaatgacatggttacaaatgctttgcttcatgtggaagattgcctaaagtacatgtctgatttgcgagatcctgctatcttccggttttgtgcaattccacagattgtgtcaattggaacactagctttatgctacaacaacattcaagtcttcagaggggtagtgaaaatgagacgtggtcttactgctaaagttattgatcgaacaaatacaatgtcagacgtatatggtgctttcttcgatttttcttgtatgctgaagtccaaggttgacaacaatgatcccaatgctacaaaaactctgagtaggctagaagcaattcagaaaatatgcaaaaattctggagccctgaccactaaaaggaaatcttacataatcgagaatgagtcaggatacaattcgaccctgattgttatcctcttcattatactggctatcctttatgcatatctatcttcaaacctaccaaatagcctgtgattgggttttgcaagacccacaattcttgaggagatgatcatcttagtttactcaagcttgttatatacagtactgttaatgtatctttcacttgtaaaactattcatcataaattttgtactttatggtatgctgctgtttaaacccggaactgtagtttggaatgttgtaaaagattattgctgattttttataattgagatcttcagaaattaaaatgaaaaaaaaaaagtaaaaaaaaaaaaaaaa

SEQ ID NO: 948 - protein, 415 aa, Panax quinquefolius
MGSLGAILKHPDDFYPLLKLKIAARHAEKQIPSEPHWAFCYSMLHKVSRSFGLVIQQLGPQLRDAVCIFYLVLRALDTVEDDTSISTEVKVPILMAFHRHIYDNDWHFSCGTKEYKVLMDEFHHVSNAFLDLGSGYKEAIEDITMRMGAGMAKFICKEVETIDDYDEYCHYVAGLVGLGLSKLFHASGAEDLATDSLSNSMGLFLQKTNIIRDYLEDINEIPKSRMFWPRQIWSKYVDKLEDLKYEENSGKAVQCLNDMVTNALLHVEDCLKYMSDLRDPAIFRFCAIPQIVSIGTLALCYNNIQVFRGVVKMRRGLTAKVIDRTNTMSDVYGAFFDFSCMLKSKVDNNDPNATKTLSRLEAIQKICKNSGALTTKRKSYIIENESGYNSTLIVILFIILAILYAYLSSNLPNSL

SEQ ID NO: 949 - DNA, 1497 bp, Panax quinquefolius
  CDS (1)..(1248)
atgggaagtttgggggcaattctgaagcatccggacgatttctatccattgttgaagctcaaaatagcggcgaggcatgcggaaaaacagattccttcggagccacactgggctttctgttactctatgcttcataaggtttctcgaagcttcggcctcgtcattcaacagctcggacctcagcttcgcgatgctgtatgcattttttatttggttcttcgagcatttgacactgttgaggatgacacaagcatatctacagaggttaaagtaccaatagtgatggcttttcattgccacatatatgataacgactggcacttttcatgtggtacgaaggaatacaaagttctcatggatgagttccatcacgtttctaatgcttttctggatcttggaagcggttacaaggaggcaatagaagatattacaatgagaatgggtgcaggaatggcaaaatttttatgcaaggaggtggagacaattgatgattatgatgaatactgtcactatgtggcaggactagttggattagggttgtcaaagctcttccatgcctctggggcagaagatttcgctacagattctctgtccaattcaatgggtttatttctccagaagacaaacattattcgagattatctggaggacataaatgagataccaaagtcacgcatgttttggccttgccagatttggagtaaatatgtcgataaacttgaggacttaaaatatgaggaaaactcagggaaggcagtgcagtgcctgaatgacatggttacaaatgctttgcttcatgtggaagattgcttaaagtacatgtctgatttgcgagatcctgctatcttccggttttgtgcaattccacagattatggcaattggaacactagctttatgctacaataacattcaagtcttcagaggggtagtgaaaatgagacgtggtcttactgctaaagttattgatcgaacaaatacaatgtcagacgtatatggtgctttcttcgatttttcttgtatgctgaagtccaaggttgacaacaatgatcccaatgctacaaaaactctgagtaggctagaagcaattcagaaaatatgcaaaaattctggagccctgaccactaaaaggaaatcttacataatcgagaatgagtcaggatacaattcgaccctgattgttatcctcttcattatactggctatcctttatgcatatctatcttcaaacctaccaaatagcctgtgattgggttttgcaagaccgacaattcttgaggagatgatcatcttagtttactcaagcttgttatatacagtactgttaatgtatctttcacttgtaaaactattcatcataaattttgtactttatggtatgctgctgtttaaacccggaactgtagtttggaatgttgtaaaagattattgctgattttttataattgagatcttcagaaattaaaatgaaaaaaaaaaagtaaaaaaaaaaaaaaaa

SEQ ID NO: 950 - protein, 415 aa, Panax quinquefolius
MGSLGAILKHPDDFYPLLKLKIAARHAEKQIPSEPHWAFCYSMLHKVSRSFGLVIQQLGPQLRDAVCIFYLVLRAFDTVEDDTSISTEVKVPIVMAFHCHIYDNDWHFSCGTKEYKVLMDEFHHVSNAFLDLGSGYKEAIEDITMRMGAGMAKFLCKEVETIDDYDEYCHYVAGLVGLGLSKLFHASGAEDFATDSLSNSMGLFLQKTNIIRDYLEDINEIPKSRMFWPCQIWSKYVDKLEDLKYEENSGKAVQCLNDMVTNALLHVEDCLKYMSDLRDPAIFRFCAIPQIMAIGTLALCYNNIQVFRGVVKMRRGLTAKVIDRTNTMSDVYGAFFDFSCMLKSKVDNNDPNATKTLSRLEAIQKICKNSGALTTKRKSYIIENESGYNSTLIVILFIILAILYAYLSSNLPNSL

SEQ ID NO: 951 - DNA, 1242 bp, Glycyrrhiza uralensis
  CDS (1)..(1242)
atggggagtttgggagcgatcgcgaggcaccctgatgacgtgtacccgcttctgaagctgaaaatggcggcgaggcatgcggagaagcagatcccagaggagccacactgggccttctgttacacaatgctcctcaaggtctctcgcagtttcgcactcgtcattcagcagctcgacccccaactccgcaacgctgtttgcattttttatttggttcttcgagcccttgacactgttgaggatgatactagcatagctactgatgtcaaggtgccgatactgatagcttttcatagacacatatatgatcgtgactggcacttttcctgtggcacaaaggagtacaaagtcctcatggaccagtttcatcatgtttcaactgcttttttggaacttgaaaagaactatcaagcagcaattgagaatattaccaaaaggatgggtgcaggaatggctaaatttatttgcaacgaggtagaaacagttgatgactatgatgaatattgtcactatgtggcaggacttgttgggctaggtttatctaagcttttccacgcctctggtaaagaagatttggctccagaccacctttccaattcaatggggctgtttcttcagaaaacaaacattattcgagattatctcgaagacatcaatgagatccccaagtcacgcatgttttggcctcggcagatctggagtaaatatgttaacaaacttgaggacttgaaatatgaggagaactccgtgaaagcagtgcaatgcttaaacgacatggtcactaatgctttgttgcatgctgaagattgcttaaagtacatgtctgctttacgagacatgtctatatttcgattttgtgctattccccagatcatggcaattggaacactggcattatgctacaacaacattgaagtcttcggaggtgtagttaaaatgagacgaggtttaactgcaaaagtcattgaccgaacaaagacaatggccgatgtctatggtgctttctttgacttttcttgtatgttgaagtccaaggttgacaaaaatgatcccaatgcaacaaaaacattgagcaggctggaagctatacagaaaacttgcagggaatctggtcttctaagtaaaaggaaaccatacatactaaggaatgaatctacaaacagctctactatggttctcatacttgtcatcatattgtccatcatttttgcttatctctctgccaaccgccaaaataactag

SEQ ID NO: 952 - protein, 413 aa, Glycyrrhiza uralensis
MGSLGAIARHPDDVYPLLKLKMAARHAEKQIPEEPHWAFCYTMLLKVSRSFALVIQQLDPQLRNAVCIFYLVLRALDTVEDDTSIATDVKVPILIAFHRHIYDRDWHFSCGTKEYKVLMDQFHHVSTAFLELEKNYQAAIENITKRMGAGMAKFICNEVETVDDYDEYCHYVAGLVGLGLSKLFHASGKEDLAPDHLSNSMGLFLQKTNIIRDYLEDINEIPKSRMFWPRQIWSKYVNKLEDLKYEENSVKAVQCLNDMVTNALLHAEDCLKYMSALRDMSIFRFCAIPQIMAIGTLALCYNNIEVFGGVVKMRRGLTAKVIDRTKTMADVYGAFFDFSCMLKSKVDKNDPNATKTLSRLEAIQKTCRESGLLSKRKPYILRNESTNSSTMVLILVIILSIIFAYLSANRQNN

SEQ ID NO: 953 - DNA, 1239 bp, Glycyrrhiza uralensis
  CDS (1)..(1239)
atggggagtttgggagcgattctgaagcatccagatgacttgtatccgctgctgaaactgaaaatcgcggcaaggcaagccgagaagcagatccctcgtgaaccgcattggagcttctgttacaccatgctccacaaggtttctcgtagtttcgccttcgttattcagcagctcggtcccgatcttcgcaacgccgtttgcatattctatttggttcttcgagctctcgataccgttgaggatgatactagcatagctacagatgtcaaggtgccaatactaatagcttttcatcgccacatctatgatcgtgattggcacttttcatgtggcacgaaggagtacaaagttctaatggaccaatttcatcatgtttcaacggcttttctggaacttggaaagaactatcaggaagcaattgaggacattaccaaaagaatgggtgctggaatggccagatttatttgcaaggaggtagaaacagttgatgactacgatgaatattgtcactatgtggcaggacttgttgggctgggtttatcaaagctttttcatgcctctggttcagaagatctggcttcagattacctttcaaattcaatgggcttgtttcttcagaaaacaaacattattcgggattatctggaagacatcaatgagatacccaagtcacgcatgttttggccacgacagatctggagtaaatatgttaacaagcttgaggatttgaaatatgaggacaactccgttaaggcagtgcaatgtttaaacgacatggtcactaatgctctgatgcatgctgaagattgcttaaaatacatggctgctttacgagacctggctatatttcgcttttgtgctattccccagataatggcaattggaacacttgcattatgctacaacaacattgagctctttagaggtgtagttaaaatgaggcgaggtctaactgccaaagtgattgaccgaacaaagaccatggctgatgtctatggtgctttctttgattttgcttctatgttggagtccaaggttgacaaaaatgatcccaatgcaacaaaaacgttgagcaggctggaagctatacagaaaacttgcagagaatctggtctcctgaacaaaaggaaatctttattgaggaatgggaacggatatggctcaaccatgattctcattctggtcatcttgtttggcatcatgtttgcttatctctctgccaaccaccaagataactag

SEQ ID NO: 954 - protein, 412 aa, Glycyrrhiza uralensis
MGSLGAILKHPDDLYPLLKLKIAARQAEKQIPREPHWSFCYTMLHKVSRSFAFVIQQLGPDLRNAVCIFYLVLRALDTVEDDTSIATDVKVPILIAFHRHIYDRDWHFSCGTKEYKVLMDQFHHVSTAFLELGKNYQEAIEDITKRMGAGMARFICKEVETVDDYDEYCHYVAGLVGLGLSKLFHASGSEDLASDYLSNSMGLFLQKTNIIRDYLEDINEIPKSRMFWPRQIWSKYVNKLEDLKYEDNSVKAVQCLNDMVTNALMHAEDCLKYMAALRDLAIFRFCAIPQIMAIGTLALCYNNIELFRGVVKMRRGLTAKVIDRTKTMADVYGAFFDFASMLESKVDKNDPNATKTLSRLEAIQKTCRESGLLNKRKSLLRNGNGYGSTMILILVILFGIMFAYLSANHQDN

SEQ ID NO: 955 - DNA, 1911 bp, Zea mays
  CDS (117)..(1322)
ctccactgcatctgccatcttggggaactctttggcctctggaaccggcctgcccagccgctcgatcgacgttcggcgaggaggctgatccggtctgttggatcggaggcgcggcgatgggggcgctgtcgcggccggaggaggtgctggcgctggtaaagctgcgggtggcggcggggcagatcaagcgccagatcccgcccgaggagcactgggccttcgcctactccatgctccagaaggtgtcccgtagcttcgctctcgtcatccagcagctcggacccgaactccgcaatgccgtgtgcatcttctacctcgtgctccgtgccctcgacaccgttgaggacgacactagcatcccgaccgaggtgaaggtgcccatcctccaggaattctaccggcacatctacaaccgcgactggcattattcgtgtggaacaaatcactacaaaatgctaatggataagtttcgccacgtatccactgccttcctggagcttggtgaaggttaccaaaaggcaatagaagaagtcactaggcgaatgggtgcaggaatggcaaaatttatatgcaaagaggttgaaactgttgatgactatgacgagtattgtcactatgtagctgggctagttggttatggactttccaggctcttctatgctgctgggacggaagatctggctctagattcactgtcaaattcaatgggcctatttttacagaaaactaacataattagggactatttggaggacataaatgagataccaaagtcccgcatgttctggcctcgagagatatggagtaaatatgcagataaacttgaggacttcaaatatgaggagaactccaaaaaagcagtacaatgcttgaacaatatggtgactgatgcactgattcatgctgaagagtgccttcagtacatgtcagccttgaaggatcctgccattttccgtttttgtgcaataccccagataatggcaattggaacatgtgctctttgctacaataacgtgcatgtcttcagaggagttgtgaagatgagacgtggtctcacggcacgaataattgacgagacaaactcaatgacagatgtctatactgctttctatgagttttcttcattgatagagtcaaagattgatgacagtgatccaaatgctgctctaacacagagacgtgtggattcaataaagcaaacttgcaagtcatctggtttggtaaagcaaagggggtaccatttggagaagtcaccttacaggcctatgctgatcatgattgtcctcctgctggtagctattcttttcggggtaatgttctagctggccctttcttttccgcgatggagacttgagagaaactatgccaatcagatcctttttgtactgtgtattctccaaaggctgcagcaaattcggaagtactgactgtagatcgatacggctgcatgctactgtttccatgactccgttgatgctctcaattcgtttgttcattttattttctcgcgctttgtattgtttgaagctgttttaaggcagaaaatactatcgtgacatgtatgatgtatcctacgaacatgtgtctcagtttagttagcaatggctgcacctctgttcttaaggcgtcgcctaggcgtccgggcgatgggcgatggtctaacgcctaagcgctttgcccgcctacctcacctaggcgttcagaaggtgctccaacgtcttggaccgccttaccgctttaaaaactatgggctgcactgtagttattctatgtgttgtcttgttttcatatctgatatgtttgtgtttatcataactgtgtactctcccatggcgctaattataatcaatattatatgtatgtttagctaaattttaaaacatctaatgataatagttatgtactaaaaaa

SEQ ID NO: 956 - protein, 401 aa, Zea mays
MGALSRPEEVLALVKLRVAAGQIKRQIPPEEHWAFAYSMLQKVSRSFALVIQQLGPELRNAVCIFYLVLRALDTVEDDTSIPTEVKVPILQEFYRHIYNRDWHYSCGTNHYKMLMDKFRHVSTAFLELGEGYQKAIEEVTRRMGAGMAKFICKEVETVDDYDEYCHYVAGLVGYGLSRLFYAAGTEDLALDSLSNSMGLFLQKTNIIRDYLEDINEIPKSRMFWPREIWSKYADKLEDFKYEENSKKAVQCLNNMVTDALIHAEECLQYMSALKDPAIFRFCAIPQIMAIGTCALCYNNVHVFRGVVKMRRGLTARIIDETNSMTDVYTAFYEFSSLIESKIDDSDPNAALTQRRVDSIKQTCKSSGLVKQRGYHLEKSPYRPMLIMIVLLLVAILFGVMF

SEQ ID NO: 957 - DNA, 1590 bp, Glycine max
  CDS (112)..(1353)
cagaagaagtcagtaaccatcgtcgtgagcgaagatccataataatacagttacaaattgcaataacacactcattgtggttatcgaaatttgatcgcagcgtcgagaagaatggggagtttgggagcgattctgaaacatccagatgacttttaccctctgctgaagctgaaaatggcggcgaggaacgccgagaagcagatcccgccggagccgcactgggcgttctgctacacaatgctccacaaggtttctcgaagtttcgccctcgtcattcagcaactcggcatcgagcttcgcaacgccgtttgcatattttatttggttctgcgagctctcgacaccgttgaggatgatactagcatagaaacagatgtcaaggtgccaatactgatagcctttcaccgtcatatttatgatcgtgattggcacttttcatgtggcacaaaggagtacaaagttctaatggaccagtttcatcatgtttcaactgcttttctggaacttggaaagaactaccaggaagcaattgaggacattaccaaaagaatgggtgctggaatggccaaatttatttgcaaggaggtagaaacaattgatgactatgatgaatattgtcactatgtggcaggacttgttgggctgggtttatcaaagcttttccatgcatctggttcagaagatctggctccagatgacctttccaattcaatgggcttgtttctacagaaaacaaacattattcgagattatctggaagacatcaatgagatccccaagtcacgcatgttttggccacgacagatttggagtgaatatgttaacaaacttgaggatttgaaatatgaggagaactctgttaaggcagtgcaatgcttaaatgacatggtcactaatgccctgatgcatcctgaagattgcttaaaatacatggctgctttacgtgacccgcctatatttcgcttttgtgctataccccagataatggcaattggaacacttgcattatgctacaacaacattgaggtcttcagaggtgtagttaaaatgaggcgaggtttaactgccaaagtgattgaccgaacaaagactatggctgatgtctacggtgctttttttgattttgcttctatgttggagcccaaggttgacaaaaacgatcccaatgcaacaaaaacattgagcaggctggaagctatacagaaaacttgcagagaatctggtctcttaagtaaaaggaaatcttacattgtgaatgatgaaagtggatatggctcaaccatgattgtcatattggtcatcatggtttccatcatttttgcttatctgtctgctaaccaccataatagctagttagtgaaacactgatagcacgcctcgttcatggaatgcgaatttgcatgcatgcaagcaatagtatgatggctgcagttgactatcgtgtattttaattgaaaaatagtcgaatatagcgtcaagagcttcttgtgtttagtttggatttaactctatccctacgttcatcccgaaaattatcattattatgtgtgttataagttgattgtattaacatttcacggataaagttgg

SEQ ID NO: 958 - protein, 413 aa, Glycine max
MGSLGAILKHPDDFYPLLKLKMAARNAEKQIPPEPHWAFCYTMLHKVSRSFALVIQQLGIELRNAVCIFYLVLRALDTVEDDTSIETDVKVPILIAFHRHIYDRDWHFSCGTKEYKVLMDQFHHVSTAFLELGKNYQEAIEDITKRMGAGMAKFICKEVETIDDYDEYCHYVAGLVGLGLSKLFHASGSEDLAPDDLSNSMGLFLQKTNIIRDYLEDINEIPKSRMFWPRQIWSEYVNKLEDLKYEENSVKAVQCLNDMVTNALMHPEDCLKYMAALRDPPIFRFCAIPQIMAIGTLALCYNNIEVFRGVVKMRRGLTAKVIDRTKTMADVYGAFFDFASMLEPKVDKNDPNATKTLSRLEAIQKTCRESGLLSKRKSYIVNDESGYGSTMIVILVIMVSIIFAYLSANHHNS

SEQ ID NO: 959 - DNA, 1515 bp, Nicotiana tabacum
  CDS (1)..(1236)
atggggagtttgagggcgattttgaagaatccagatgatttgtatccattggtaaagctgaagctagcggctcgacacgcggagaagcagatcccgccgtctccacattggggcttctgttactcaatgcttcataaggtttctcgtagctttgctctcgtcattcaacaacttcccgtcgagcttcgtgacgccgtgtgcattttctatttggttcttcgagcacttgacactgttgaggatgataccagcattcccaccgatgttaaagtacctattctgatctcttttcatcagcatgtttatgatcgtgaatggcatttttcatgtggtacaaaagagtacaaggttctcatggaccagttccatcatgtttcaactgcttttctggagcttaggaaacattatcagcaggcaattgaggatattaccatgaggatgggtgcaggaatggcaaaattcatatgcaaggaggtggaaacaactgatgattatgacgaatattgtcactatgtagctgggcttgttgggctaggattgtcaaaactgttccatgcctctgggaaagaagatctggcttcagattctctctccaactccatgggtttatttcttcagaaaacaaacatcattagagattatttggaagacataaatgaagtacccaagtgccgtatgttctggccccgtgaaatatggagtaaatatgttaacaagcttgaggaattaaagtacgaggataactcggccaaagcagtgcaatgtctcaatgacatggtcactaatgctttatcacatgtagaagattgtttgacttacatgtctgctttgcgtgatccttccatctttcgattctgtgctattccacaggtcatggcaattgggacattagctatgtgctacgacaacattgaagtcttcagaggagtggtaaaaatgagacgtggtctgactgctaaggtcattgaccagaccaggactattgcagatgtatatggtgctttttttgacttttcttgtatgctgaaatccaaggttaataataatgatccaaatgcaacaaaaactctgaagaggctcgaagctatcctgaaaacttgcagagattcgggaaccttgaacaaaaggaaatcctacataatcaggagcgagcctaattacagtccagttctgattgttgtcatattcatcatactggctattattcttgcacagctatctggaaaccgatcttagacgatattttgggttacaaaaaagaagtcaggtcaaggaagacagcacaagctcttggccaattatgtgattagtgcaaattttgatgtttgtaattctatgttcattaagtgatagttgcaccttttaacctgacatgataattacgaaaacctatttttggtggtttgttgggtatgtacttgtttgcaagctacgaaagcaaattccaagtgttgtagagtcactatgatgtaataaacatgtcttttataatagtttgttcatttttgtggtaaa

SEQ ID NO: 960 - protein, 411 aa, Nicotiana tabacum
MGSLRAILKNPDDLYPLVKLKLAARHAEKQIPPSPHWGFCYSMLHKVSRSFALVIQQLPVELRDAVCIFYLVLRALDTVEDDTSIPTDVKVPILISFHQHVYDREWHFSCGTKEYKVLMDQFHHVSTAFLELRKHYQQAIEDITMRMGAGMAKFICKEVETTDDYDEYCHYVAGLVGLGLSKLFHASGKEDLASDSLSNSMGLFLQKTNIIRDYLEDINEVPKCRMFWPREIWSKYVNKLEELKYEDNSAKAVQCLNDMVTNALSHVEDCLTYMSALRDPSIFRFCAIPQVMAIGTLAMCYDNIEVFRGVVKMRRGLTAKVIDQTRTIADVYGAFFDFSCMLKSKVNNNDPNATKTLKRLEAILKTCRDSGTLNKRKSYIIRSEPNYSPVLIVVIFIILAIILAQLSGNRS

SEQ ID NO: 961 - DNA, 1434 bp, Panax ginseng
  CDS (46)..(1293)
tcgacttcgttttgcatctttatcgaatccatatatagagagaaaatgggaagtttgggggcaattctgaagcatccggaagatttctatccgttgttgaagcttaaatttgcggctaggcatgcggaaaagcagatccctccggagccacactgggccttctgttactctatgcttcataaagtttctcgaagtttcggcctcgtcattcaacagctcggccctcagctccgcgatgctgtatgcattttttatttggttcttcgagcacttgacactgttgaggatgacacaagtatacctacagaggttaaagtacctatcttgatggcttttcatcgccacatatatgataaggactggcacttttcatgtggtacgaaggaatacaaagttctcatggacgagtttcatcatgtttctaatgcttttcttgagcttggaagcggttaccaggaggcaatagaagatattaccatgagaatgggtgcaggaatggcaaaatttatatgcaaggaggtggagacaataaatgattatgatgaatattgtcactatgtagcaggacttgttggattagggttgtcaaagctcttccatgcctctggggcagaagatttggctacagattctctgtccaattcaatgggtttatttctccagaagacaaacataattcgagattacttggaggacataaatgagataccaaagtcacgcatgttttggcctcgccagatttggagtaaatatgtcgataaacttgaggacttgaaatatgaggaaaactcagccaaggcagtgcagtgcctaaatgacatggtcacagatgctttggttcatgctgaagattgcctaaagtacatgtctgacttgcgaggtcctgctatcttccggttctgtgcaataccacagattatggcaattggaacactagctttatgctttaacaacactcaagtcttcagaggggtagtgaaaatgagacgtggtcttactgctaaagttattgaccaaacaaaaacaatgtcagatgtatatggtgctttcttcgatttttcttgtttgctgaagtccaaggttgacaacaatgatcccaatgctacaaaaactttgagcaggctagaagcaattcagaaaacatgcaaggagtctggaaccctgtccaaaaggaaatcatacataatcgagagcgagtcaggacacaattcagccctgattgctattatcttcattatactagctatcctttatgcatatctatcttcaaacctactactgaacaaacagtgagaacacagttcatgactggatgcacaagcaaattcctagtttcttcagagtaaagcttattatatatacactgttaatgttgtattcttgacttgtaaaactattcattacacatatatctaattctcttcagtaatttct

SEQ ID NO: 962 - protein, 415 aa, Panax ginseng
MGSLGAILKHPEDFYPLLKLKFAARHAEKQIPPEPHWAFCYSMLHKVSRSFGLVIQQLGPQLRDAVCIFYLVLRALDTVEDDTSIPTEVKVPILMAFHRHIYDKDWHFSCGTKEYKVLMDEFHHVSNAFLELGSGYQEAIEDITMRMGAGMAKFICKEVETINDYDEYCHYVAGLVGLGLSKLFHASGAEDLATDSLSNSMGLFLQKTNIIRDYLEDINEIPKSRMFWPRQIWSKYVDKLEDLKYEENSAKAVQCLNDMVTDALVHAEDCLKYMSDLRGPAIFRFCAIPQIMAIGTLALCFNNTQVFRGVVKMRRGLTAKVIDQTKTMSDVYGAFFDFSCLLKSKVDNNDPNATKTLSRLEAIQKTCKESGTLSKRKSYIIESESGHNSALIAIIFIILAILYAYLSSNLLLNKQ

SEQ ID NO: 963 - DNA, 1248 bp, Bupleurum falcatum
  CDS (1)..(1248)
atgggaagtttgggggcgtttttgaagcatccggatgatttgtatccattgttaaagcttaaatatgcggttaaacatgccgagaaacagatcccgccgcagccgcactgggcgttttgttactctatgcttcacaaggtttctagaagcttcggtctcgtcattcaacagctcggacctcagcttcgggatgctgtatgcattttttacttggttcttcgagcgcttgataccgttgaggatgacacgagcatttcttcagaggttaaagtgcctatcttgatggaatttcatcgccacatatataataatagttggcacttttcatgtggtacaaaggaatacaaaattctcatggatgggttccatcatgtttccaatgcgtttttggagcttggaaaaggttaccaggaagcaatagaagatatcaccatgcgaatgggtgcaggaatggcaaaatttatatgcaaggaggtagaatcaattgatgattatgatgaatactgtcactatgtagctggtcttgttggattagggttgtcgaagctctttcatgcttcaggggcggaagatctggcgacagatgctttatccaattcaatgggtttatttctccagaagacaaacatcattcgagactaccttgaggacattaatgagataccaaagtcacgcatgttttggccccgccagatctggagtaaatatgttgataaacttgaggacttaaagtatgaggagaactcagcaaaggcagtgcaatgcttgaatgatatggttacaaatgctctgatacatgcagaagattgtctaaagtacatgtctgatttgcgagatcctgccaatttccggttctgtgcaattccacagattatggcaattggaacactttctttatgcttcaacaacattcaagtcttcagaggagtagtgaaaatgaggcgtggtcttactgctaaaattattgatcgaacaaaaacaatgtccgacgtgtatggcgctttctttgatttttcgtgtttgctgaaggccaaggtagaccatgatgatccaagtgcaaaaataactttaagcaggctagaagctattcaacaaacatgcaagaattcaggaactttaaccaaaagcagaaaatcatacatacttgagaacgaatcgagatacaactctgtcttgattgctattatcttcatcatcctggctttcttttatgcgtatttatcatcaaacctctcaaacaatgcatga

SEQ ID NO: 964 - protein, 415 aa, Bupleurum falcatum
MGSLGAFLKHPDDLYPLLKLKYAVKHAEKQIPPQPHWAFCYSMLHKVSRSFGLVIQQLGPQLRDAVCIFYLVLRALDTVEDDTSISSEVKVPILMEFHRHIYNNSWHFSCGTKEYKILMDGFHHVSNAFLELGKGYQEAIEDITMRMGAGMAKFICKEVESIDDYDEYCHYVAGLVGLGLSKLFHASGAEDLATDALSNSMGLFLQKTNIIRDYLEDINEIPKSRMFWPRQIWSKYVDKLEDLKYEENSAKAVQCLNDMVTNALIHAEDCLKYMSDLRDPANFRFCAIPQIMAIGTLSLCFNNIQVFRGVVKMRRGLTAKIIDRTKTMSDVYGAFFDFSCLLKAKVDHDDPSAKITLSRLEAIQQTCKNSGTLTKSRKSYILENESRYNSVLIAIIFIILAFFYAYLSSNLSNNA

SEQ ID NO: 965 - DNA, 1270 bp, Panax notoginseng
  CDS (11)..(1258)
tagagagaaaatgggaagtttgggggcaattctgaagcatccggacgatttctatccgttattgaagcttaaatttgcggctaggcatgcggagaagcagatccctccggagccacactgggccttctgttactctatgcttcataaggtttctcgaagttttggcctcgtcattcaacagctcggccctcagctccgcgatgctgtatgcattttttatttggttcttcgagcacttgacactgttgaggatgacacaagtatacctacagaggttaaagtacctatcttgatggcttttcatcgccacatatatgataaggactggcacttttcatgtggtacgaaggaatacaaagttctcatggacgagtttcatcatgtttctaatgcttttctggagcttggaaacggttaccaggaggcaatagaagatattaccatgagaatgggtgcaggaatggcaaaatttatatgcaaggaggtggagacaatagatgattatgatgaatattgtcactatgtagcaggacttgttggattagggttgtcaaagctcttccatgcctctggggcagaagatttggctacagattctctgtccaattcaatgggtttatttctccagaagacaaacataattcgagattacttggaggacataaatgagataccaaagtcacgcatgttttggcctcgccagatttggagtaaatatgtcgataaacttgaggacttaaaatatgaggaaaactcagccaaggcagtgcggtgcctaaatgacatggtcacaaatgctttggttcatgctgaagattgcctaaagtacatgtctgacttgcgagatcctgctatcttccggttctgtgcaataccacagattatggcaattggaacactagctttatgcttcaacaacactcaagtcttcagaggggtagtgaaaatgagacgtggtcttactgctaaagttatagaccgaacaaaaacaatgtcagatgtatatggtgctttcttcgatttttcttgtttgctgaagtccaaggttgacaacaatgatcccaatgctacaaaaactttgagcaggctagaagcaattcagaaaacatgcaaggagtctggaaccctgtccaaaaggaaatcatacataatcgagagcgagtcaggacacaattcagccctgattgctattatcttcattatactagctatcctttatgcatatctatcttcaaacctactaccgaacaaacagtgagaaccccagttc

SEQ ID NO: 966 - protein, 415 aa, Panax notoginseng
MGSLGAILKHPDDFYPLLKLKFAARHAEKQIPPEPHWAFCYSMLHKVSRSFGLVIQQLGPQLRDAVCIFYLVLRALDTVEDDTSIPTEVKVPILMAFHRHIYDKDWHFSCGTKEYKVLMDEFHHVSNAFLELGNGYQEAIEDITMRMGAGMAKFICKEVETIDDYDEYCHYVAGLVGLGLSKLFHASGAEDLATDSLSNSMGLFLQKTNIIRDYLEDINEIPKSRMFWPRQIWSKYVDKLEDLKYEENSAKAVRCLNDMVTNALVHAEDCLKYMSDLRDPAIFRFCAIPQIMAIGTLALCFNNTQVFRGVVKMRRGLTAKVIDRTKTMSDVYGAFFDFSCLLKSKVDNNDPNATKTLSRLEAIQKTCKESGTLSKRKSYIIESESGHNSALIAIIFIILAILYAYLSSNLLPNKQ

SEQ ID NO: 967 - DNA, 1613 bp, Glycyrrhiza glabra
  CDS (77)..(1318)
cacgagttccctcccggttttcttccattttgcatttcaattctgagatttcgatttggatatcgcactcggaactatggggagtttgggagcgatcgtgaggcaccctgatgaggtgtacccgcttctgaagctgaaaatggcggcgaggcatgcggagaagcagatcccagcggagccacactgggccttctgttacacaatgctcctcaaggtctctcgcagtttcgcactcgtcattcagcagctcgacccccaactccgcaacgctgtttgcattttttatttagttcttcgagcccttgacactgttgaggatgatactagcatagctactgatgtcaaggagccgatactgatagcttttcatagacacatatatgatcgtgactggcacttttcctgtggcacaaaggagtacaaagtcctcatggaccagtttcatcatgtttcaactgcttttttggaacttgaaaagaactatcaagcagcaattgagaatattaccaaagagatgggtgcaggaatggctaaatttatttgcaacgaggtagaaacagttgatgactacgatgaatattgtcactatgtggcaggacttgttgggctaggtttatctaagcttttccacgcctctggtaaagaagatttggctccagaccacctttccaattcaatgggtctgtttcttcagaaaacaaacattattcgagattatctcgaagacatcaatgagatccccaagtcacgcatgttttggcctcggcagatctggagtaaatatgttaacaaacttgaggatttgaaatatgaggagaactccgtgaaagcagtgcaatgcttaaacgacatggtcactaatgctttgttgcatgctgaagattgcttaaagtacatgtctgctttacgagacatgtctatatttcgattttgtgctattccccagatcatggcaattggaacactggcattatgctacaacaacattgaagtcttcagaggtgtagttaaaatgagacgaggtttaactgcaaaagtcattgaccgaacaaagacaatggccgatgtctatggtgctttctttgacttttcttgtatgttgaagtccaaggttgacaaaaatgatcccaatgcaacaaaaacattgagcaggctggaagctatacagaaaacttgcagggaatctggtcttctaagtaaaaggaaaccatacatactaaggaatgaatctacaaacagctctactatggttctcatacttgtcatcatattgtccatcatttttgcttatctctctgctaaacgccaagataattaggagtattctagcttaagcctttccaagcatggatagcaatgcaacaccactagcatgccgcgttccatggaatatgggttttcacgcttgcaagcagtataatttgatgcatgcagttatttgtataattactattatattatttgtataataacctaataattgaaacgaatggtcaaacacggttcctttcatagtggggagcggaatatcctttttttatcgttaattgtagtttttttaaagatagttattgcataattttaaataaatttaaattttcagttattaaata

SEQ ID NO: 968 - protein, 413 aa, Glycyrrhiza glabra
MGSLGAIVRHPDEVYPLLKLKMAARHAEKQIPAEPHWAFCYTMLLKVSRSFALVIQQLDPQLRNAVCIFYLVLRALDTVEDDTSIATDVKEPILIAFHRHIYDRDWHFSCGTKEYKVLMDQFHHVSTAFLELEKNYQAAIENITKEMGAGMAKFICNEVETVDDYDEYCHYVAGLVGLGLSKLFHASGKEDLAPDHLSNSMGLFLQKTNIIRDYLEDINEIPKSRMFWPRQIWSKYVNKLEDLKYEENSVKAVQCLNDMVTNALLHAEDCLKYMSALRDMSIFRFCAIPQIMAIGTLALCYNNIEVFRGVVKMRRGLTAKVIDRTKTMADVYGAFFDFSCMLKSKVDKNDPNATKTLSRLEAIQKTCRESGLLSKRKPYILRNESTNSSTMVLILVIILSIIFAYLSAKRQDN

SEQ ID NO: 969 - DNA, 1473 bp, Glycyrrhiza glabra
  CDS (93)..(1331)
atggacacgatttctcgccattgaaaattgaaatttcgatttccgtcggggaagggaagagaagatttgttctgagtcagagaaagtaaaggatggggagtttgggagcgattctgaagcatccagatgacttgtatccgctgctgaaactgaaaatcgcggcaaggcaagccgagaagcagatccctcgtgaaccgcattggagcttctgttacaccatgctccacaaggtttctcgtagtttcgccttcgttattcagcagctcggtcccgatcttcgcaacgccgtttgcatattctatttggttcttcgagctctcgataccgttgaggatgatactagcatagctacagatgtcaaggtgccaatactaatagcttttcatcgccacatctatgattgtgattggcacttttcatgtggcacgaaggagtacaaagttctaatggaccaatttcatcatgtttcaacggcttttctggaacttggaaagaactatcaggaagcaattgaggacattaccaaaagaatgggtgctggaatggccgaatttatttgcaaggaggtagaaacagttgatgactatgatgaatattgtcactatgtggcaggacttgttgggatgggtttatcaaagctttttcatgcctctggttcagaagatctggcttcagattacctttcaaattcaatgggcttgtttcttcagaaaacaaacattattcgggattatctggaagacatcaatgagatacccaagtcacgcatgttttggccacgacagatctggagtaaatatgttaacaagcttgaggatttgaaatatgaggagaactccgttaaggcagtgcaatgtttaaacgacatggtcactaatgctctgatgcacgctgaagattgcttaaaatacatggctgctttacgagacctggctatatttcgcttttgtgctattccccagataatggcaattggaacacttgcattatgctacaacaacattgagctctttagaggtgtagttaaaatgaggcgaggtctaactgccaaagtgattgaccgaacaaagaccatgggtgatgtctatggtgctttctttgattttgcttctatgttggagtccaaggttgacaaaaatgatcccaatgcaacaaaaacgttgagcaggctggaagctatacagaaaacttgcagagaatctggtctcctgaacaaaaggaaatctttattgaggaatgggaacggatatggctcaaccatgattctcattctggtcatcttgtttggcatcatgtttgcttatctctctgccaaccaccataataactaatgcgatgattgagatcaagacgtgtacttgaaaatacaatcgttgattattgacaatccattgtaatattagtagaaggctaacgccggagagcatgtattctatttttatataataaatttgagtcaatgagtttttggta

SEQ ID NO: 970 - protein, 412 aa, Glycyrrhiza glabra
MGSLGAILKHPDDLYPLLKLKIAARQAEKQIPREPHWSFCYTMLHKVSRSFAFVIQQLGPDLRNAVCIFYLVLRALDTVEDDTSIATDVKVPILIAFHRHIYDCDWHFSCGTKEYKVLMDQFHHVSTAFLELGKNYQEAIEDITKRMGAGMAEFICKEVETVDDYDEYCHYVAGLVGMGLSKLFHASGSEDLASDYLSNSMGLFLQKTNIIRDYLEDINEIPKSRMFWPRQIWSKYVNKLEDLKYEENSVKAVQCLNDMVTNALMHAEDCLKYMAALRDLAIFRFCAIPQIMAIGTLALCYNNIELFRGVVKMRRGLTAKVIDRTKTMGDVYGAFFDFASMLESKVDKNDPNATKTLSRLEAIQKTCRESGLLNKRKSLLRNGNGYGSTMILILVILFGIMFAYLSANHHNN

SEQ ID NO: 971 - DNA, 1573 bp, Centella asiatica
  CDS (104)..(1351)
attccatttccattttcttcaaaataattacaaaatttttctccgcctgcaaatttagcaaattatcatcaaattcatatatagaaattgatatagtgtaaaaatgggaagtttaggggcgattctgaagcatccggacgatttctatccgttgttgaagctgaaaatggcggcgaggcatgctgagaaacagatcccgccggagccgcactgggcattttgttactctatgcttcataaggtttctagaagtttcggtctcgtcattcaacagctcggtccgcagcttcgcgatgctgtatgcatattttatttagttcttcgagctcttgacactgttgaggatgacactagcatatctacagaggttaaagtaccaatattgaaggcttttcatcgtcacatatatgataataactggcacttttcatgtggtacaaaggaatacaaaattctcatggacgagttccatcatgtttctaatgcttttctggagctcggaagcggttacaaggaggcaatagaagatattaccatgagaatgggtgcaggaatggcaaaatttatatgcaaggaggtagagacaattgacgattatgatgaatattgtcactatgtggcaggtctggttgggttagggttgtcaaagctcttccatgcctctggggctgaagatttggcttcagactctctgtctaattcaatgggtttatttctccagaagacaaacatcattcgagattatctggaggacataaatgagatacccaagtcacggatgttttggccacggaaaatttggaataaatatgtcaacaaacttgaggacttaaaatatgaggagaattcggtcaaggcagtgcagtgcctcaacgacatggtcacgaatgctttgctgcatgttgaagattgcctgaaatacatgtctgatttgcgagatcctgctatcttccggttttgtgcaattccacagattatggctattggaactcttgctttatgttacaacaatcttcaagtcttcagaggggtagtgaaaatgagacgcggtcttactgctaaagttattgaccgaacaaataaaatgtcagatgtatatggtgctttctacgatttttcttgtatgttgaagaccaaggtcgacaacaatgatcccaatgctacaaaaactttgagcaggctagaagcaattcagaagaaatgcaaggagtcaggagtcataacacccaacaggaaatcttacgtacttgagaatgactcgggatacaacttagtcctgattgccatcctcttcattatactagctcttgtttatgcatacctatcttccaatctatcgaataaccgatgattagttttggcaacatctaaacaagggcagatgcaacatagagccagtaatacctattgccatatttctatttttatggttttttaaaattggattttgatgtgtatgtttatgtaatgttgtgtgatataatgtattgtgtgtaggatgaacttcgaagctcacttcttcctgtagctatcctaatatgcagcaattttaacactaaaaaaaaaaaaaaaa

SEQ ID NO: 972 - protein, 415 aa, Centella asiatica
MGSLGAILKHPDDFYPLLKLKMAARHAEKQIPPEPHWAFCYSMLHKVSRSFGLVIQQLGPQLRDAVCIFYLVLRALDTVEDDTSISTEVKVPILKAFHRHIYDNNWHFSCGTKEYKILMDEFHHVSNAFLELGSGYKEAIEDITMRMGAGMAKFICKEVETIDDYDEYCHYVAGLVGLGLSKLFHASGAEDLASDSLSNSMGLFLQKTNIIRDYLEDINEIPKSRMFWPRKIWNKYVNKLEDLKYEENSVKAVQCLNDMVTNALLHVEDCLKYMSDLRDPAIFRFCAIPQIMAIGTLALCYNNLQVFRGVVKMRRGLTAKVIDRTNKMSDVYGAFYDFSCMLKTKVDNNDPNATKTLSRLEAIQKKCKESGVITPNRKSYVLENDSGYNLVLIAILFIILALVYAYLSSNLSNNR

SEQ ID NO: 973 - DNA, 1257 bp, Artemisia annua
  CDS (1)..(1257)
atgagtagtttgaaagcagtattgaaacacccagatgacttttatccattattgaagttgaaaatggctgcaaagaaagccgaaaaacagatcccatcacaacctcactgggctttctcttattccatgcttcataaagtttctagaagtttcgctcttgttattcaacaacttaatccccagcttcgtgatgctgtctgcatcttttatttggttcttcgcgctcttgatactgttgaggatgatacaagcatagctgctgatatcaaagtacccattctgatcgcctttcataagcatatctacaatcgtgattggcactttgcatgtggtacaaaggaatacaaagttctcatggaccagttccaccatgtttctactgcctttctggaacttaagagaggttatcaggaggcaattgaggatataaccatgagaatgggcgctgggatggcaaaatttatatgtaaagaggttgagacagttgatgattatgatgagtattgtcattatgttgcgggacttgttggaatagggttgtcaaagctcttccattcttcaggcacggaaattttgttttctgattctatctccaattcgatgggtttatttcttcagaaaacaaatatcattagagattatctcgaggatattaatgagatacctaagtcacgcatgttttggcctcgtgagatctggagtaaatatgtgaataaactagaggacctgaaatatgaagagaactctgagaaagccgttcagtgcttaaatgatatggtgacaaatgctttgatacacattgaagactgcttaaagtatatgtctcagttgaaagatccagccatcttcaggttttgtgcaataccacagatcatggcaattggaacacttgctttatgctacaataacattgaggttttcaggggtgtagtcaaattgagacgtggtctaactgccaaagtaattgatcggactaaaacaatggctgatgtgtaccaggctttttctgatttttctgacatgcttaagtccaaggttgacatgcatgatcccaatgcccaaacgaccatcactaggttagaagcagctcagaaaatttgcaaagactctggcacccttagcaacaggaaatcttacatagttaagagggagtcaagctacagtgcagctttgcttgctctgcttttcactatactggctattctttatgcttatctctctgctaatcgacccaataaaatcaaattcactttgtaa

SEQ ID NO: 974 - protein, 418 aa, Artemisia annua
MSSLKAVLKHPDDFYPLLKLKMAAKKAEKQIPSQPHWAFSYSMLHKVSRSFALVIQQLNPQLRDAVCIFYLVLRALDTVEDDTSIAADIKVPILIAFHKHIYNRDWHFACGTKEYKVLMDQFHHVSTAFLELKRGYQEAIEDITMRMGAGMAKFICKEVETVDDYDEYCHYVAGLVGIGLSKLFHSSGTEILFSDSISNSMGLFLQKTNIIRDYLEDINEIPKSRMFWPREIWSKYVNKLEDLKYEENSEKAVQCLNDMVTNALIHIEDCLKYMSQLKDPAIFRFCAIPQIMAIGTLALCYNNIEVFRGVVKLRRGLTAKVIDRTKTMADVYQAFSDFSDMLKSKVDMHDPNAQTTITRLEAAQKICKDSGTLSNRKSYIVKRESSYSAALLALLFTILAILYAYLSANRPNKIKFTL

SEQ ID NO: 975 - DNA, 1899 bp, Lotus japonicus
  CDS (255)..(1496)
ggcaccagcccattttgcacagcgtatcccaaaccgtacaaaaactcaacgcgaaatagcagttccatcgccatttcccacctcaaatatcacttttccaaaattatcacaaatcactcacacacgaacaacgacgacgggcgaagaaaccaaagcacttttctcgttaacgaacgaaatcgatttcgtaaccgcaacgattcaactcttctctctcgctcgccattttgaaaaccacagaaaatcgatcggagatggggagtttgggagcgattgtgaagcatccagatgatttgtacccgctgctgaagctcaaaatggcggcgaggcacgccgagaagcagatcccttcggagccgcattggggcttctgctactccatgctccacaaggtttctagaagcttcgccctcgtcattcagcaactcgacactgatcttcgcaacgccgtttgcatattctacttggttcttcgagctctggataccgttgaggatgatacgagcatagctacagaagtaaaggtccccatactgaaagcttttcaccgtcacatctatgatcgtgattggcacttctcatgtggcacaaaggagtacaaagttctcatgggccagtttcatcttgtttcaactgcttttctggaacttgcaaagaactatcaggaagcaattgaagacattactgacagaatgggtgctggaatggccaaatttatttgcaaggaggtagaaacaattgatgactacgacgaatattgtcactatgtggcaggacttgttgggctgggtttatcaaagcttttccatgcctctggtaaagaaaatctggcagcggattccctttccaattcaatgggtttgtttcttcagaaaacaaacattattcgagattatctggaagacataaacgagatccccaaatcacgcatgttttggccacggcagatctggagtaaatatgttaacaaacttgaggacttgaaatatgaggagaactctgttaaggcagtgcaatgtctaaacgacatggtcactaatgctctgatgcatgctgaagattgcttaaagtacatgtctgatttacgagacgattctatatttcgcttttgtgctattccccagataatggcaattggaacacttgcaatatgctacaacaacgttgaggtcttcagaggtgtagtgaaaatgaggcgaggtctaactgccaaagtgattgatcggacaaagaccattgctgatgtctatggtgctttctttgattttgcttctatgttggagtccaaggttgacaaaaatgatcccaatgcaacaaagacattgagcaggctggtagctatacagaaaacttgcagagaatctggactcctaaataaaaggaaatcttacattctgaggaaagagaacggatatggctcaacactgattatcatactggtcctcttgttttccatcatgtttgcttatagctctgctacccgccatagtaactagtgtaagttccattgttaaatttattgcaccgtttatcatttgtaagaagccaaaaaaatcacgttaccctttcagagaaaattgctatgtttcttgctttttcaaaagtggatgtcactgaaacattgatagcatgcctccttccgtggaatgtggttttacatgctggcctgcaatattttgaaggatgcagttgactatcattcatgtattctatttgtaaaataatggttgaatatatagtatagtacctttagcttcatgtgtattcaaatttaccagtgttcatccaggaaattatcattgagtgtcgtttgatatatacactgatgaagttgtaattccaaaatgattccattgtaatgccagaacgctggagctaaaaaaaaaaaaaaaaaaaaaa

SEQ ID NO: 976 - protein, 413 aa, Lotus japonicus
MGSLGAIVKHPDDLYPLLKLKMAARHAEKQIPSEPHWGFCYSMLHKVSRSFALVIQQLDTDLRNAVCIFYLVLRALDTVEDDTSIATEVKVPILKAFHRHIYDRDWHFSCGTKEYKVLMGQFHLVSTAFLELAKNYQEAIEDITDRMGAGMAKFICKEVETIDDYDEYCHYVAGLVGLGLSKLFHASGKENLAADSLSNSMGLFLQKTNIIRDYLEDINEIPKSRMFWPRQIWSKYVNKLEDLKYEENSVKAVQCLNDMVTNALMHAEDCLKYMSDLRDDSIFRFCAIPQIMAIGTLAICYNNVEVFRGVVKMRRGLTAKVIDRTKTIADVYGAFFDFASMLESKVDKNDPNATKTLSRLVAIQKTCRESGLLNKRKSYILRKENGYGSTLIIILVLLFSIMFAYSSATRHSN

SEQ ID NO: 977 - DNA, 1776 bp, Medicago truncatula
  CDS (259)..(1500)
ggcacgagggtatttttttgagttaaataaaatacaaggtgagagagagtgtatatgcgaatcttcacatctcaaaccaactgtacgaacgaaatcccccaacgacaaatacatacatagaagttaccatcaccaatctccaaaattatcacattcacaaaaattcattattttcccaatattcaattcaatttctcttcattgaacaaattccatttccagatagagagaataatcgcttattcgtagaaacaaaagatgggaagtataaaagcgattttgaagaatccagatgatttctttccattacttaagctgaaaatcgcggccagaaacgccgagaagcagatcccaccggaaccgcattggggattctgttactctatgcttcataaggtttctagaagcttcggtcttgttattcagcagcttggtcctgagcttcgtgatgctgtttgcatattctatttggttcttcgcgctcttgataccgttgaggatgatacaagcatagaaacagatgtcaaggttcccatactaatagattttcatcgtcacatttatgataatgattggcactttgggtgtggcacgaaggagtacaaagttctaatggaccagtttcatcatgtttcaaaggcttttctggaacttggaaagaactatcaggatgcaatcgaggacattacgaaaagaatgggtgctggaatggcgaaattcatttgcaaggaggtagaaacagttgatgactacgatgaatattgtcactatgtggctggacttgttgggctgggtttatcaaagcttttctatgcctctggtaaagaagatctggctacagacaaactttcaaattcaatgggtttgtttcttcagaaaaccaacattattcgagattatctggaagacatcaatgagataccaaagtcacgcatgttttggccacggcagatctggagtaaatatgttagcaaacttgaggacttgaaatatgaggaaaactccgttaaggctgtgcaatgcttaaatgacatggtcactaatgctttgctgcatgctgacgattgcttacaatacatgtctgcattacgagactcctctaattttcgcttttgtgctattcctcaggtaatggcaattggaacacttgcaatgtgctacaacaacattggtgtcttcagaggtgtagttaaaatgaggcgaggtctaactgccaaagtgattgaccgaaccaagactatggctgatgtctatggtgctttctttgattttgcttccgtgttggagtccaaggttgacaaaaatgatccaaatgcaacaaaaacatcgagcaggctggaagctatacagaaaacttgcagagaatctggtctcctaaccaaaaggaaatcttacgttttgaggaatgagagcggatatggctctaccatgattctcttactggtcatcttgttttccatcatttttgcttatctctctgccaatcgtcacaataactaatcaacgggtattttggccttcgcaagcatggatagcaacagaacagtggtagcatggcccactcacggaatgtgaatttgcatgcatgggagcgatatttgatgcgtgcatttgaaaattgtgtattctatttgaatgagtagtagatatagatatagttcctagtttcctacgttgggttgaactttacctctacattcacccataaaattatgattgttatgcgtgttgtcagttatttaaatgttttccaaaaaaaaaaaaaaaaaaaaaaaa

SEQ ID NO: 978 - protein, 413 aa, Medicago truncatula
MGSIKAILKNPDDFFPLLKLKIAARNAEKQIPPEPHWGFCYSMLHKVSRSFGLVIQQLGPELRDAVCIFYLVLRALDTVEDDTSIETDVKVPILIDFHRHIYDNDWHFGCGTKEYKVLMDQFHHVSKAFLELGKNYQDAIEDITKRMGAGMAKFICKEVETVDDYDEYCHYVAGLVGLGLSKLFYASGKEDLATDKLSNSMGLFLQKTNIIRDYLEDINEIPKSRMFWPRQIWSKYVSKLEDLKYEENSVKAVQCLNDMVTNALLHADDCLQYMSALRDSSNFRFCAIPQVMAIGTLAMCYNNIGVFRGVVKMRRGLTAKVIDRTKTMADVYGAFFDFASVLESKVDKNDPNATKTSSRLEAIQKTCRESGLLTKRKSYVLRNESGYGSTMILLLVILFSIIFAYLSANRHNN

SEQ ID NO: 979 - DNA, 1539 bp, Artemisia annua
  CDS (24)..(1280)
ggatttggatcttgaagaagaaaatgagtagtttgaaagcagtattgaaacacccagatgacttttatccattattgaagttgaaaatggctgcaaagaaagccgaaaaacagatcccatcacaacctcactgggctttctcttattccatgcttcataaagtttctagaagtttcgctcttgttattcaacaacttaatccccagcttcgtgatgctgtctgcatcttttatttggttcttcgcgctcttgatactgttgaggatgatacaagcatagctgctgatatcaaagtacccattctgatcgcctttcataagcatatctacaatcgtgattggcactttgcatgtggtacaaaggaatacaaagttctcatggaccagttccaccatgtttctactgcctttctggaacttaagagaggttatcaggaggcaattggggatataaccatgagaatgagcgctgggatggcaaaatttatatgtaaagaggttgagacagttgatgattatgatgagttttgtcattatgttgcgggacttgttggaatagggttgtcaaagctcttccattcttcaggcacggaaattttgttttctgattctatctccaattcgatgggtttatttcttcagaagacaaatatcattagagattatctcgaggatattaatgagatacctaagtcacgcatgttttggcctcgtgagatccggagtaaatatgttaataagcttgaggacctgaaatatgaagaggactctgagaaagccgttcagtgcttaaatgatatggtgacaaatgctttgatacacattgaagactgcttaaagtatatgtctcagttgaaagatccagccatcttcaggttttgtgcaataccacagatcatggcaattggaacacttgctttatgctacaataacattgaggttttcaggggtgtagtcaaattgagacgtggtctaactgccaaagtaattgatcggactaaaacaatggctgatgtgtaccaggctttttctgatttttctgacatgcttaagtccaaggttgacatgcatgatcccaatgcccaaacgaccatcactaggttagaagcagctcagaaaatttgcaaagactctggcacccttagcaacaggaaatcttacatagttaagagagagtcaagctacagtgcagctttgcttgctctgcttttcactatactggctattctttatgcttatctctctgctaatcgacccaataaaatcaaattcactttgtaagaatctcgcggtgatacgtaagcaaagaagatccagtcttgaaatgtaaaaggtattgtttttatattgttggggttgctatgtttattatctctatatgttttgtggttggtatggttggtggtaggatattattgtaaatgtaagtagttgcaatctcatttgcgatttatgtggaatacaaatgccaacatttaagaacttaatatcaccaattgtactgtttgttaaaaaaaaaaaaaaaaaaaaaaaaaaaaaa

SEQ ID NO: 980 - protein, 418 aa, Artemisia annua
MSSLKAVLKHPDDFYPLLKLKMAAKKAEKQIPSQPHWAFSYSMLHKVSRSFALVIQQLNPQLRDAVCIFYLVLRALDTVEDDTSIAADIKVPILIAFHKHIYNRDWHFACGTKEYKVLMDQFHHVSTAFLELKRGYQEAIGDITMRMSAGMAKFICKEVETVDDYDEFCHYVAGLVGIGLSKLFHSSGTEILFSDSISNSMGLFLQKTNIIRDYLEDINEIPKSRMFWPREIRSKYVNKLEDLKYEEDSEKAVQCLNDMVTNALIHIEDCLKYMSQLKDPAIFRFCAIPQIMAIGTLALCYNNIEVFRGVVKLRRGLTAKVIDRTKTMADVYQAFSDFSDMLKSKVDMHDPNAQTTITRLEAAQKICKDSGTLSNRKSYIVKRESSYSAALLALLFTILAILYAYLSANRPNKIKFTL

SEQ ID NO: 981 - DNA, 1386 bp, Botryococcus braunii
  CDS (1)..(1386)
atggggatgcttcgctggggagtggagtctttgcagaatccagatgaattaatcccggtcttgaggatgatttatgctgataagtttggaaagatcaagccaaaggacgaagaccggggcttctgctatgaaattttaaaccttgtttcaagaagttttgcaatcgtcatccaacagctccctgcacagctgagggacccagtctgcatattttaccttgtactacgcgccctggacacagtcgaagatgatatgaaaattgcagcaaccaccaagattcccttgctgcgtgacttttatgagaaaatttctgacaggtcattccgcatgacggccggagatcaaaaagactacatcaggctgttggatcagtaccccaaagtgacaagcgttttcttgaaattgaccccccgtgaacaagagataattgcagacattacaaagcggatggggaatggaatggctgacttcgtgcataagggtgttcccgacacagtgggggactacgacctttactgccactatgttgctggggtggtgggtctcgggctttcccagttgttcgttgcgagtggactacagtcaccctctttgacccgcagtgaagacctttccaatcacatgggcctcttccttcagaagaccaacatcatccgcgactactttgaggacatcaatgagctgcctgccccccggatgttctggcccagagagatctggggcaagtatgcgaacaacctcgctgagttcaaagacccggccaacaaggcggctgcaatgtgctgcctcaacgagatggtcacagatgcattgaggcacgcggtgtactgcctgcagtacatgtccatgattgaggatccgcagatcttcaacttctgtgccatccctcagaccatggccttcggcaccctgtctttgtgttacaacaactacactatcttcacagggcccaaagcggctgtgaagctgcgtaggggcaccactgccaagctgatgtacacctctaacaatatgtttgcgatgtaccgtcatttcctcaacttcgcagagaagctggaagtcagatgcaacaccgagaccagcgaggatcccagcgtgaccaccactctggaacacctgcataagatcaaagctgcctgcaaggctgggctggcacgcacaaaagatgacacctttgacgaattgaggagcaggttgttagcgctgacgggaggcagcttctacctcgcctggacctacaatttcctagaccttcgaggcccgggagacctgcccaccttcttatctgtaacccaacattggtggtctattctgatcttcctcatttcgattgccgtcttctttattccgtcgaggccctcacctagacccacactcagcgcctaa

SEQ ID NO: 982 - protein, 461 aa, Botryococcus braunii
MGMLRWGVESLQNPDELIPVLRMIYADKFGKIKPKDEDRGFCYEILNLVSRSFAIVIQQLPAQLRDPVCIFYLVLRALDTVEDDMKIAATTKIPLLRDFYEKISDRSFRMTAGDQKDYIRLLDQYPKVTSVFLKLTPREQEIIADITKRMGNGMADFVHKGVPDTVGDYDLYCHYVAGVVGLGLSQLFVASGLQSPSLTRSEDLSNHMGLFLQKTNIIRDYFEDINELPAPRMFWPREIWGKYANNLAEFKDPANKAAAMCCLNEMVTDALRHAVYCLQYMSMIEDPQIFNFCAIPQTMAFGTLSLCYNNYTIFTGPKAAVKLRRGTTAKLMYTSNNMFAMYRHFLNFAEKLEVRCNTETSEDPSVTTTLEHLHKIKAACKAGLARTKDDTFDELRSRLLALTGGSFYLAWTYNFLDLRGPGDLPTFLSVTQHWWSILIFLISIAVFFIPSRPSPRPTLSA

SEQ ID NO: 983 - DNA, 1647 bp, Capsicum annuum
  CDS (121)..(1356)
cacgagctcacacagtacgttgcctttacaaatcctatttccctttcgctttctcatattttttttcgttatacatcaacaaagtagtatttgtgtgatttgaatttgttgtgaggaagaatggggactttgagagcgattttgaagaatccagatgatttgtatccattgataaagctaaaactagcggctcgacatgccgaaaagcagatcccgccggagccacattggggattctgttacttaatgcttcaaaaagtctctcgtagttttgctctcgtcattcaacagcttcctgtcgagcttcgtgatgctgtatgcatattctatttggtccttagagcacttgacactgtcgaggatgataccagcattcccacggatgttaaagtacctattctgatctcttttcatcagcatatctatgatcgtgaatggcacttttcatgtggtacaaaggagtacaaggttctcatggaccagttccatcatgtctcaactgcttttctggaacttggaaaaaattatcagcaagcaattgaggatattaccatgaggatgggtgcaggaatggcaaaatttatatgcaaggaggtggaaacaaccgatgattatgacgaatattgtcactacgtagctgggcttgttgggctaggattgtcaaaactgttccatgcatctgggaaagaagatctggcttcagattctctctccaactccatgggtttatttcttcagaaaacaaacatcattagagattatctggaagacataaatgaagtacccaagtgccgtatgttttggccccgtgagatttggagtaaatatgttaacaagcttgaggagttaaagtatgaggagaactcggtcaaggcagtgcaatgtcttaatgacatggtcaccaatgctttgtcacatgtagaagattgtttgatttacatgtccaatttgcgtgatcctgccatctttcgattctgtgctattccacaggtcatggcaattgggactttagctatgtgctatgacaacattgaagtcttcagaggagtggttaaaatgagacgtggtctgacagctaaggccattgaccggactagaactatggctgatgtatatggtgctttttttgacttctcttgtatgctgaaatccaaggttaataataatgatccaaatgcaacaaaaactttgaagaggcttgaagcaatcctgaaaacttgcagagactcgggaaccttgaataaaaggaaatcttacgtaatcaagagcgagcctacttacagtccagttctgatctttgtcatcttcatcatactggctattattcttgcacacctatctggaaaccgctcttagatgatctgtgaccatcttttgggttagaagtttggtcaaggaggtcaattatgtgattaatacaaattgtcatgtttgtattagtatgtattaagtgatagttgcaccttcaacctgacagataacgaaagcctattatctggtagtttgttgagtatgtacttgtttgcaagctgctacgaaagcaaattccaattgttgtagaagtcggtttaccgtaatatacatttcattgtaacagcttgtaaaaaaaaaaaaaaaaaaaaaaaaaaaaaaaaaaaaaaaaaaaaa

SEQ ID NO: 984 - protein, 411 aa, Capsicum annuum
MGTLRAILKNPDDLYPLIKLKLAARHAEKQIPPEPHWGFCYLMLQKVSRSFALVIQQLPVELRDAVCIFYLVLRALDTVEDDTSIPTDVKVPILISFHQHIYDREWHFSCGTKEYKVLMDQFHHVSTAFLELGKNYQQAIEDITMRMGAGMAKFICKEVETTDDYDEYCHYVAGLVGLGLSKLFHASGKEDLASDSLSNSMGLFLQKTNIIRDYLEDINEVPKCRMFWPREIWSKYVNKLEELKYEENSVKAVQCLNDMVTNALSHVEDCLIYMSNLRDPAIFRFCAIPQVMAIGTLAMCYDNIEVFRGVVKMRRGLTAKAIDRTRTMADVYGAFFDFSCMLKSKVNNNDPNATKTLKRLEAILKTCRDSGTLNKRKSYVIKSEPTYSPVLIFVIFIILAIILAHLSGNRS

SEQ ID NO: 985 - DNA, 1662 bp, Solanum tuberosum
  CDS (136)..(1371)
cgaacactcccacgccattccctctctccctttggctttctggatttgttttcttcatacatcaacacgtatttgtgtgtgatttgattgtggatcggtgattgatcggaacagtgtttgaatttgttgagaagaatgggaacattgagggcgattctaaagaatccagatgatttgtatccattgataaagctgaaactagcagctagacatgcggagaagcagatcccgccggagccacattggggcttctgttacttaatgcttcaaaaggtctctcgtagttttgctctcgtcattcaacagcttcctgtcgagcttcgtgatgctgtatgcatattttatttggtccttcgagcacttgacactgttgaggatgataccagcatacccaccgatgttaaagtacctattctgatctcttttcatcagcatgtttatgatcgcgaatggcactttgcatgtggtacgaaggagtacaaggttctcatggaccaattccatcatgtttcgactgcttttctggaacttggtaaactttatcagcaggcaattgaggacattaccatgaggatgggtgcaggaatggcaaaatttatatgcaaggaggtggaaacaactgatgattatgacgaatactgtcactatgtagctgggcttgttgggctaggattgtcaaaactgttccatgcctctgggacagaagatctggcttcagattctctctccaactccatgggtttatttcttcagaaaacaaacattatcagagattatttggaagatataaatgaagtacccaagtgccgtatgttctggccccgtgagatttggagtaaatatgttaacaagcttgaggacttaaagtacgaggagaactcggttaaggcagtgcaatgtctcaatgaaatggtcaccaatgctttgtcacatgtagaagattgtttgacttacatgttcaatttgcgtgatccttccatctttcgattctgtgccattccacaggtcatggcaattgggacattagctatgtgctacgacaacattgaagtcttcagaggagtggtaaaaatgaggcgtggtcttactgctaaggtcattgaccggaccaagactatggcagatgtatatggtgctttttttgacttttcttgtatgctgaaatccaaggttaataataacgatccaaatgcaacaaaaactttgaagaggcttgatgccatcctgaaaacttgcagagactcgggaaccttgaacaaaaggaaatcttacataatcaggagcgagcctaattacagtccagttctgattgttgtcatcttcatcatactggctattattcttgcacaactttctggcaaccgatcttagaccatttattggtctacaaaaatgaagtatggtcaaggaagacagcacaaactcttggccaattatgtactgctaattgttatgcttgtattactatgttcattaagttaatagttgcatcttcaacctgactagataattacgaaagcatatttatggcagttagtttggtatgtatttgtttgcaagctaggaaagcaaattccaagtgttgtagagtcgtttttccgtaatgcacatttcattttaatactctgtcgaattttgtggtaaattgacgtatttacagag

SEQ ID NO: 986 - protein, 411 aa, Solanum tuberosum
MGTLRAILKNPDDLYPLIKLKLAARHAEKQIPPEPHWGFCYLMLQKVSRSFALVIQQLPVELRDAVCIFYLVLRALDTVEDDTSIPTDVKVPILISFHQHVYDREWHFACGTKEYKVLMDQFHHVSTAFLELGKLYQQAIEDITMRMGAGMAKFICKEVETTDDYDEYCHYVAGLVGLGLSKLFHASGTEDLASDSLSNSMGLFLQKTNIIRDYLEDINEVPKCRMFWPREIWSKYVNKLEDLKYEENSVKAVQCLNEMVTNALSHVEDCLTYMFNLRDPSIFRFCAIPQVMAIGTLAMCYDNIEVFRGVVKMRRGLTAKVIDRTKTMADVYGAFFDFSCMLKSKVNNNDPNATKTLKRLDAILKTCRDSGTLNKRKSYIIRSEPNYSPVLIVVIFIILAIILAQLSGNRS

SEQ ID NO: 987 - DNA, 1336 bp, Arabidopsis thaliana
  CDS (1)..(1233)
atggggagcttggggacgatgctgagatatccggatgacatatatccgctcctgaagatgaaacgagcgattgagaaagcggagaagcagatccctcctgagccacactggggtttctgctattcgatgctccacaaggtttctcgaagcttttctctcgttattcagcaactcaacaccgagctccgtaacgccgtgtgtgtgttctacttggttctccgagctcttgatactgttgaggatgatactagcataccaactgatgaaaaggttcccatcctgatagcttttcaccggcacatatacgatactgattggcattattcatgtggtacgaaggagtacaagattctaatggaccaatttcaccatgtttctgcagcttttttggaacttgaaaaagggtatcaagaggctatcgaggaaattactagaagaatgggtgcagggatggccaagtttatctgccaagaggtagaaactgttgatgactacgatgaatactgccactatgttgctgggcttgttggtttaggtttgtcgaaactcttcctcgctgcaggatcagaggttttgacaccagattgggaggcgatttccaattcaatgggtttatttctgcagaaaacaaacattatcagagattatcttgaggacattaatgagataccaaaatcccgcatgttttggcctcgcgagatttggggcaaatatgctgacaagcttgaggatttaaaatacgaggagaacacaaacaaatccgtacagtgcttaaatgaaatggttaccaatgcgttgatgcatattgaagattgcctgaaatacatggtttccttgcgtgatccttccatatttcggttctgtgccatccctcagatcatggcgattggaacacttgcattatgctataacaatgaacaagtattcagaggcgttgtgaaactgaggcgaggtcttactgctaaagtcattgatcgtacaaagacaatggctgatgtctatggtgctttctatgatttttcctgcatgctgaagacaaaggttgacaagaacgatccaaatgccagtaagacactaaaccgacttgaagccgttcagaaactctgcagagacgctggagttcttcaaaacagaaaatcttatgttaatgacaaaggacaaccaaacagtgtctttattataatggttgtgattctactggccatagtctttgcatatctcagagcaaactgagtgatccatgtaagcgagtctgattgtatcaccatcattcaagatgttcagagcaaatttgagtgatgaagtaatctaggttgattcttattcacgccactga

SEQ ID NO: 988 - protein, 410 aa, Arabidopsis thaliana
MGSLGTMLRYPDDIYPLLKMKRAIEKAEKQIPPEPHWGFCYSMLHKVSRSFSLVIQQLNTELRNAVCVFYLVLRALDTVEDDTSIPTDEKVPILIAFHRHIYDTDWHYSCGTKEYKILMDQFHHVSAAFLELEKGYQEAIEEITRRMGAGMAKFICQEVETVDDYDEYCHYVAGLVGLGLSKLFLAAGSEVLTPDWEAISNSMGLFLQKTNIIRDYLEDINEIPKSRMFWPREIWGKYADKLEDLKYEENTNKSVQCLNEMVTNALMHIEDCLKYMVSLRDPSIFRFCAIPQIMAIGTLALCYNNEQVFRGVVKLRRGLTAKVIDRTKTMADVYGAFYDFSCMLKTKVDKNDPNASKTLNRLEAVQKLCRDAGVLQNRKSYVNDKGQPNSVFIIMVVILLAIVFAYLRAN

SEQ ID NO: 989 - DNA, 1326 bp, Ashbya gossypii
  CDS (1)..(1326)
atggggaaggttgttcaattattcacacacccactggagctgaaggcagctctgaagctcaaatttctgagggaaccgctttatcctgcggacgacacgcagggctctgcagagctcaagcggtgctaccagctgctacagcggacttcgaggtcttttgcggccgtgataatggagctacatcccgagctgcgcaacgcggtgatgctgttctacctgattctgcgtgcgctggatactgttgaagacgatatgacgatcagtcccaaggtaaaggtgccgctactccgggagttcgaccagaaactgaagctggatacgtggagtttcgacggcaacgcgaagacggagaaggaccgtgacgtgctggtggagttcagcacgattctagccgagttccacaagctgaagcccgagtaccagcaggtgattgcagacatcacacacaagatgggcaacggcatggcagactacattctggacgagaagtttaatttgagcgggttggagacgatccaggactacgaccgctactgccactatgttgcagggctcgttggagacgggctaacccatttgatcatgctggcgaaattcagcagtccgggcctgtattatgactctcccgacctctacgagagcatggggcttttcctccagaagacgaacattatcagagactacgcggaggacctggcagacgggcgctcgttctggccaaaggaaatctggtcacattacgcagatgacctggccagtttttcgaagcctgaaaatgctaccgctggcgtttactgtatcaaccacctcgtcctgaacgcgctaggccacgtccagcacgtcctcacgtaccttgcttctttgagggagcagtcctccttccagttttgcgcgataccccaggtaatggccattgcgacattggcgcttgtgtttgggaatgagcgcgtgctccaaacaagcgtgaaaatcagaaagggtacgacttgttatctaattttaaagtcccgcaccttccaaggatgtgtggagatctttgaacactatctgcgcgacatccggaagcgcctgactgttgccgaccccaattacctgaagctaaatattgaaatcgcaaagcttgacaaattcattgaggagatgtaccaggataaattgcccgtcggtgcgaaaccacaagagacggaaatctacaagaaggttagagagagatcagcgtacgacctcgaggtcctgccacgggagcaggaggaggagttcaagtttaatgtgctgctctctatactctttaccgtctttggggctctgtactggtatgccaagtga

SEQ ID NO: 990 - protein, 441 aa, Ashbya gossypii
MGKVVQLFTHPLELKAALKLKFLREPLYPADDTQGSAELKRCYQLLQRTSRSFAAVIMELHPELRNAVMLFYLILRALDTVEDDMTISPKVKVPLLREFDQKLKLDTWSFDGNAKTEKDRDVLVEFSTILAEFHKLKPEYQQVIADITHKMGNGMADYILDEKFNLSGLETIQDYDRYCHYVAGLVGDGLTHLIMLAKFSSPGLYYDSPDLYESMGLFLQKTNIIRDYAEDLADGRSFWPKEIWSHYADDLASFSKPENATAGVYCINHLVLNALGHVQHVLTYLASLREQSSFQFCAIPQVMAIATLALVFGNERVLQTSVKIRKGTTCYLILKSRTFQGCVEIFEHYLRDIRKRLTVADPNYLKLNIEIAKLDKFIEEMYQDKLPVGAKPQETEIYKKVRERSAYDLEVLPREQEEEFKFNVLLSILFTVFGALYWYAK

SEQ ID NO: 991 - DNA, 1900 bp, Candida albicans
  CDS (332)..(1678): transl_table=12
atcaatcacctcttgtcataaacgacaaaaagttgttaaattaaatttttccaacactaatctcacaacaacgacaacaacaaccaaaattaaaaaaaaatttcagcaacaccttttactaccatcaaaagatttctttaacagttaacgacatctttcacaattgattgtccctctttaattccttttctttgcttttttcatcacctctccacgcttattgcattagaattcatcaattcaaaaagatatatattattctcttcccaacccaatattttttcaccacctgttgtcaaatttattccacattaaaccaccaatatatacaatgggcaaatttttacaattattatcacatcctactgaacttaaagcagttatacaactttttggatttagacaaccattacatccaggtaaaagagatgttaatgataaagaattgggtagatgttatgaattattgaatctaacttcaagatcatttgctgctgtcattgaagaattacatccagaattacgtgatgcggtgatgatcttttatcttgtattaagagcattagatactattgaagatgatatgacgattaaatcatcaattaaaatccctttgttgcgtgaatttgatactaaattgaatactaaaaattggacatttgatggttatggacccaatgaaaaagatcgaactgttttagttgaatttgataagattttgaatgtttatcatagattaaaacctcaatatcaagatattattaaaagtattacttttaaaatgggtaatggtatggcagattatattttagatgaagaatttaatgtttatggtgttgccaccgttgaagattataatttatattgtcattatgttgctggattagtaggtgaaggtttaactaatctttttgtattggctaattttggtgataaaacattgacagaaaataattttgctaaagctgattccatggggttatttttacaaaaaacaaatattattagagattatcatgaagatttacaagatggtagaagtttttggcctcgagaaatttggtctaaatatactgaaaatttacaagatttccataaagtaaaaacccctgccaaagaatttgctggagtaagttgtattaatgaattagttttaaatgcattgggtcatgtcactgattgtcttgattatttatcattagttaaagatccttcttcattctcattttgtgctattcctcaagtaatggcagtggctactttagctgaagtttataataatcctaaagttttacacggagtggtcaaaattagaaaaggtactacttgtagattgatattagaaagtagaacattaccaggggttgtcaagattttcaaagaatatattcaagtgattaatcataaatcatcagttagagatccaaattatttgaagattgggattaaatgtggtgaaattgaacaatattgtgaaatgatatatccaaacaaacaagctttacctccaagtatgaaatcattaccagaaaataaattcaccaagattgttgctagtagagaaagtattgatttatctgtacaaagaagaattgaaccaggaaatttcaattgtaatgttgtgttatttggtattggtgctttaattttaagtttaatttattttgtcctttattgattatagaagataaattatttgcttttacacatcaaagagtattatttatgcatttacaaaagatatactagtactactgctactgctactaataataataataagaatagctagctacgtatacatataatttaataaactagatgaaaaaaaaaaaaaaacataccagtattaacgtaacttgggctgatctactgttagtcctcctcatgggtttttatt

SEQ ID NO: 992 - protein, 448 aa, Candida albicans
MGKFLQLLSHPTELKAVIQLFGFRQPLHPGKRDVNDKELGRCYELLNLTSRSFAAVIEELHPELRDAVMIFYLVLRALDTIEDDMTIKSSIKIPLLREFDTKLNTKNWTFDGYGPNEKDRTVLVEFDKILNVYHRLKPQYQDIIKSITFKMGNGMADYILDEEFNVYGVATVEDYNLYCHYVAGLVGEGLTNLFVLANFGDKTLTENNFAKADSMGLFLQKTNIIRDYHEDLQDGRSFWPREIWSKYTENLQDFHKVKTPAKEFAGVSCINELVLNALGHVTDCLDYLSLVKDPSSFSFCAIPQVMAVATLAEVYNNPKVLHGVVKIRKGTTCRLILESRTLPGVVKIFKEYIQVINHKSSVRDPNYLKIGIKCGEIEQYCEMIYPNKQALPPSMKSLPENKFTKIVASRESIDLSVQRRIEPGNFNCNVVLFGIGALILSLIYFVLY

SEQ ID NO: 993 - DNA, 1332 bp, Candida glabrata
  CDS (1)..(1332)
atgggtaaagtacttgacttggcgctgcatccgcttgaattgagagctgctttgaagcttaagtttatcagacagccattgttcagcaccaatgacaccagagctactccacagctggagagatgttacgagctgttgaatctgacctccagatcctttgctgcggttattatggagttgcaccctgagttgcgtaatgtgatcatggtcttctatctgattctgagggctttggacactgtcgaggacgatatgaccattgatcctcaattgaaggtcaaagtgttgcgtgaattcgactccaagttggacaccaccgattggtcctttgatggcaatgatctaaaggagaaagaccgtgttgtattgaccgagttcccatgcatccttggtgaatatcacaagttgaaaccagagtatcagaaggttatcaagagaattaccggtcttatgggtaacggtatggccgactacatcttggatgagaactttaacttgaacggtgtgcaaactgttaaggactacgacaaatactgccactatgttgctggcctagtcggtgatggtttgactgaattgattgtccttgcaggttttggttctgacgatttataccatggtaaaaacagcttccaattgtacgagagcatgggattatttttgcagaagaccaacattatcagagactacgccgaggatttggatgacggtcgttctttctggcctaaagaaatctggtctgaatatgctacgaagctaaccgacttcagagacccaaagaacacccaaaagggtgtcgattgtattaaccacttggtattgaacgccttgacccatgtcatcgatgtcttgacttacctaagttcaatccacgagcaatcctcattccaattctgtgccattcctcaagttatggccatcgccactttggccaaagtcttcaacaaccctgaagtgctaagaaagaatgttaagatcagaaagggaaccacctgcgacttaattttgaactctagaactttgaaaggctgtgttgacatcttccaatactacttacgtgacatgaagcaacgtttgcctgttgaagatccaaactacttgaagtttaacattcaagttgctaagattgaacaattcattgaagaaatgttccaggacaacttaccagccggtgttgaaccaagagaaaccatgatctacttgaaggtccaagaaagattaaaatgggacacccaagttattccaagagtgcaagaagaagattacaaattcaacatggctttgagtgttgtcttctgtgtattgttaagtttctatttcttcactaagtga

SEQ ID NO: 994 - protein, 443 aa, Candida glabrata
MGKVLDLALHPLELRAALKLKFIRQPLFSTNDTRATPQLERCYELLNLTSRSFAAVIMELHPELRNVIMVFYLILRALDTVEDDMTIDPQLKVKVLREFDSKLDTTDWSFDGNDLKEKDRVVLTEFPCILGEYHKLKPEYQKVIKRITGLMGNGMADYILDENFNLNGVQTVKDYDKYCHYVAGLVGDGLTELIVLAGFGSDDLYHGKNSFQLYESMGLFLQKTNIIRDYAEDLDDGRSFWPKEIWSEYATKLTDFRDPKNTQKGVDCINHLVLNALTHVIDVLTYLSSIHEQSSFQFCAIPQVMAIATLAKVFNNPEVLRKNVKIRKGTTCDLILNSRTLKGCVDIFQYYLRDMKQRLPVEDPNYLKFNIQVAKIEQFIEEMFQDNLPAGVEPRETMIYLKVQERLKWDTQVIPRVQEEDYKFNMALSVVFCVLLSFYFFTK

SEQ ID NO: 995 - DNA, 1626 bp, Nicotiana benthamiana
  CDS (112)..(1347)
atcatcgtttccacgcaattcatcgttcaacgacttcttcaaatacaaccattttgccaacgctttctcctcttaccaaacaaacaaccccccaccaaaggctgaataagaatggggagtttgagggctattctgaagaatccagaggatttatatccattggtgaagctgaagctagcggctcgacacgcggagaagcagatcccgccgtctccaaattggggcttctgttactcaatgcttcataaggtttctcgtagctttgctctcgtcattcaacaacttccagtcgagcttcgtgacgccgtgtgcattttctatttggttcttcgagcacttgacactgttgaggatgataccagcattcccaccgatgttaaagttcctattctgatctcttttcatcagcatgtttatgatcgcgaatggcatttttcatgtggtacaaaggagtacaaggttctcatggaccagttccatcatgtatcaactgcttttctggagcttaggaaacattatcagcaggcaattgaggatattaccatgaggatgggtgcaggaatggcaaaattcatatgcaaggaggtggaaacaaccgatgattatgacgaatattgtcactatgtagctgggcttgttgggctaggattgtcaaaactgttccatgcctctgagaaagaagatctggcttcagattctctctccaactccatgggtttatttcttcagaaaacaaacatcattagagattatttggaagacataaatgaagtacccaagtgccgtatgttctggccccgtgaaatatggagtaaatatgttaacaagcttgaggaattaaagtacgaggataactcggccaaagcagtgcaatgtctaaatgacatggtcactaatgctttaccacatgtagaagattgtttgacttacatgtctgctttgcgtgatccttccatctttcgattctgtgctattccacaggtcatggcaattgggacattagctatgtgctacgacaacattgaagtcttcagaggagtggtaaaaatgagacgtggtctgactgctaaggtcattgaccggaccaggactattgcagatgtatatggtgctttttttgacttttcttgtatgctgaaatccaaggttaataataatgatccaaatgcaacaaaaactctgaagaggctcgaagtgatcctgaaaacttgcagagattcgggaaccttgaacaaaaggaaatcctacataatcaggagcgagcctaattacagtccagttctgattgttgtcattttcatcatactggctattattctcgcacagctatccggaaaccgatcttagacgatattttgggttacaaaaaagaagtctggtcaaggaagacagcagaagctcttggccaattgtgtgattagtgcagattttgatgtttgtaattctatcgtccattaagtgatagttgcaccttttaacctgacaagataattacgaagacctatttttggtggtttgttgggtatgtacttgtttgcaaggctacgtaagcaaattccaagtgttgtagagtcaccgtgatgtaataaacatgtcttttattatagtttgttcatttttgtggta

SEQ ID NO: 996 - protein, 411 aa, Nicotiana benthamiana
MGSLRAILKNPEDLYPLVKLKLAARHAEKQIPPSPNWGFCYSMLHKVSRSFALVIQQLPVELRDAVCIFYLVLRALDTVEDDTSIPTDVKVPILISFHQHVYDREWHFSCGTKEYKVLMDQFHHVSTAFLELRKHYQQAIEDITMRMGAGMAKFICKEVETTDDYDEYCHYVAGLVGLGLSKLFHASEKEDLASDSLSNSMGLFLQKTNIIRDYLEDINEVPKCRMFWPREIWSKYVNKLEELKYEDNSAKAVQCLNDMVTNALPHVEDCLTYMSALRDPSIFRFCAIPQVMAIGTLAMCYDNIEVFRGVVKMRRGLTAKVIDRTRTIADVYGAFFDFSCMLKSKVNNNDPNATKTLKRLEVILKTCRDSGTLNKRKSYIIRSEPNYSPVLIVVIFIILAIILAQLSGNRS

SEQ ID NO: 997 - DNA, 1383 bp, Schizosaccharomyces pombe
  CDS (1)..(1383)
atgagtttagctaaccgcattgaagaaatccggtgcctttgtcagtacaagctttggaatgaccttccttcttatggagaagacgaaaatgtgcctcaaaacatccgccgttgttaccaattactcgatatgacctcgagatcctttgcagtcgttattaaagaattgccaaatggtattagagaggctgttatgattttttatcttgtccttcgtggactggatacagtagaggatgacatgacgttgcctttggataaaaagcttccaatcctaagagatttttataaaacaattgaagtcgaagggtggacgtttaatgaatctggtcctaacgaaaaggatcgtcagcttctcgtagaattcgacgtggttataaaagaatatcttaacctgtcagagggttatcgtaatgttatttcgaacattactaaggaaatgggtgatggtatggcttattatgcctctcttgccgaaaaaaatgacggattctctgtagaaactatagaagactttaacaaatattgtcattatgttgccggattggtgggaattggactatctcgtttgtttgctcaatctaagctagaagatccggatttagctcatagtcaagctatttccaattctcttggactctttttacaaaaagttaacatcattcgtgattatcgtgaggattttgatgataatcgtcatttctggcctcgtgaaatttggtccaagtatacttccagtttcggtgatctctgtcttcctgacaactctgaaaaagctcttgaatgtttatctgatatgactgctaatgctttaacacatgctactgatgctctcgtttatctttctcaattgaagactcaggaaatatttaatttctgtgctattccacaagtaatggcaattgccacattagctgcagttttcagaaacccggatgtttttcaaactaatgttaagataaggaagggtcaggctgtccagattattctacattctgtaaacttgaagaatgtttgtgatttattccttcgttacacccgtgatattcattataagaacactcctaaagatcccaactttttgaagatttcaattgaatgtggaaagattgagcaagtatctgaaagcttatttccacggcgcttccgtgagatgtacgaaaaggcctatgttagtaagttgtctgaacaaaagaagggaaacggaactcagaaggcaattttaaatgacgagcaaaaggaattgtatcgaaaggatttacagaaactaggcattagcattctttttgtattttttataatccttgtatgccttgctgtcattttctatgtgttcaatattagaatacattggtcagacttcaaagagcttaatttgttttag

SEQ ID NO: 998 - protein, 460 aa, Schizosaccharomyces pombe
MSLANRIEEIRCLCQYKLWNDLPSYGEDENVPQNIRRCYQLLDMTSRSFAVVIKELPNGIREAVMIFYLVLRGLDTVEDDMTLPLDKKLPILRDFYKTIEVEGWTFNESGPNEKDRQLLVEFDVVIKEYLNLSEGYRNVISNITKEMGDGMAYYASLAEKNDGFSVETIEDFNKYCHYVAGLVGIGLSRLFAQSKLEDPDLAHSQAISNSLGLFLQKVNIIRDYREDFDDNRHFWPREIWSKYTSSFGDLCLPDNSEKALECLSDMTANALTHATDALVYLSQLKTQEIFNFCAIPQVMAIATLAAVFRNPDVFQTNVKIRKGQAVQIILHSVNLKNVCDLFLRYTRDIHYKNTPKDPNFLKISIECGKIEQVSESLFPRRFREMYEKAYVSKLSEQKKGNGTQKAILNDEQKELYRKDLQKLGISILFVFFIILVCLAVIFYVFNIRIHWSDFKELNLF

SEQ ID NO: 999 - DNA, 1719 bp, Ustilago maydis
  CDS (1)..(1719)
atgggtctcctctcgtacatcctcttggggttcacccacccgtctgaacttcgtgccatgatcggatacaaagtgtggcgtgaccctctcaacgatatcaaagccaacccgcaagcatccggttgggatcgccaacgcatgcgagactgctggggcttcctcgatctcacctctcgctcgtttgccgcggtgatcaaagaactcaagggcgagctatcgcgcgtcatctgtctcttctacctcgttctgcgtgccctcgacacggtcgaagacgatatgacgatccctgcgcaacgcaagattcccctgctagtcaacttttacaagtatcttgaacaacctggttggaactttaccgagagcgggcccaacgagaaagaccgtcaattgctcgtcgaattcgacaaagtcatcgcagagtaccagctgctcgacgtcggatacaagaccgtgatttcggacatcaccgcaaagatgggcgccggtatggcgagttacatcgagttgagtgctaaaggccccttgaaggtggccatgtggaagcactttgatttgtactgccactttgtcgccggcctcgtgggagaaggtctgtcgaggctctttagcgagagcaagttggagagaccttggttgggacaccaattggagctgtcaaatcacatgggtctcttcttgcaaaagaccaacatcatcagagactacgccgaggattgcgaggagggacgttatttctggcctcaacaatgttggggtgatgatttcgccaagttcgaatcacaacccgatgtcgccaagggaatcatcgagatcaaaccaggacatttccgaccagccgacaacgagctgggtcaacgtagcatgtacgtgctatcgtcgatgttgctcgatgccatgtcacacgccacacatgcattggactacctcgctcttctcaaggagcagtcggtattcaacttttgcgccattccgcaagtcatggcgattgccacgcttgaactcatgtttaacaacccggacgtgttcaagaagaatgtcaagatccgcaaaggcgtcgcggtcggcttgattctacgagcggtcaatccacgcgatgttgcctacacgtttttgcactactcccgcaagatgcatgcgcgcttatctcccgctgatcccaactttacacgatggtccgtcgaattggcacgcatcgaacagtggtgtgagacttactatccgtcgtttatcgctgctgcgagcgaaggcaaacctaccgatatccgagccaatgcgctgcgaagctggtccgaatcacgtcggacccaagcactcatcctcaaacaagccaagctcaatggcagtgatgcttcgactctggatgccaaatcggtgctcgaagcggcgcaaaactcggctctggatccacgtgatcttatgaccgaggacgaaagagcagcgcaagacaagagagatcgcgatcaaatggtcaagttcttcctcatcatcttggtaggcatggtgacgtttatgggcatcgtggcattgatcacgtgggagattgtgtggtggtggaccatggataccccggatccgctgagcgtgtatgtcaaacatgcgtactatctcgtcaagacccaagggtggtcgaccgtcaaggaggtgctcagaaccaccaggttgagcttcgaacatgtttggaagcacggtttgacgtcgccgcccaagttggagctgtga

SEQ ID NO: 1000 - protein, 572 aa, Ustilago maydis
MGLLSYILLGFTHPSELRAMIGYKVWRDPLNDIKANPQASGWDRQRMRDCWGFLDLTSRSFAAVIKELKGELSRVICLFYLVLRALDTVEDDMTIPAQRKIPLLVNFYKYLEQPGWNFTESGPNEKDRQLLVEFDKVIAEYQLLDVGYKTVISDITAKMGAGMASYIELSAKGPLKVAMWKHFDLYCHFVAGLVGEGLSRLFSESKLERPWLGHQLELSNHMGLFLQKTNIIRDYAEDCEEGRYFWPQQCWGDDFAKFESQPDVAKGIIEIKPGHFRPADNELGQRSMYVLSSMLLDAMSHATHALDYLALLKEQSVFNFCAIPQVMAIATLELMFNNPDVFKKNVKIRKGVAVGLILRAVNPRDVAYTFLHYSRKMHARLSPADPNFTRWSVELARIEQWCETYYPSFIAAASEGKPTDIRANALRSWSESRRTQALILKQAKLNGSDASTLDAKSVLEAAQNSALDPRDLMTEDERAAQDKRDRDQMVKFFLIILVGMVTFMGIVALITWEIVWWWTMDTPDPLSVYVKHAYYLVKTQGWSTVKEVLRTTRLSFEHVWKHGLTSPPKLEL

SEQ ID NO: 1001 - DNA, 1338 bp, Yarrowia lipolytica
  CDS (1)..(1338)
atgggaaaactcatcgaactgctcttgcaccctagcgaactgtctgctgctatccactacaagctgtggcgtcagcctctgcatccccgcgatctttccaaggagtccactgagctgcgacgatgctatgagcttctagacgtgtgctcacgatcatttgcagccgttattcgagaactgcatcctgaggtgcgagacgctgtaatgctgttctatctgattcttcgtgctctcgacacgattgaagacgatatgactctgtcgcgtgacatcaagatcccaattcttcgagacttcacgaagtgcatgaagacacctggctggaagttcaccgactctgatcccaacgagcgagatcgtgtggtgctacaggagtttcctgtggttatgactgagttcaacaagctcaagcccaagtaccaggaagtaatctacgacattaccgacagaatgggaaacggaatggccgattacgtcattgatgacgacttcaacaacaacggcgtggacaccattgccgcttatgatctgtactgtcatcatgttgccggcatcgtgggtgagggccttacccgaattacgattctcgctggttttggaaccgacgtgttgcacgaaaacccccgacttcaggagtctatgggcttgttcttgcaaaaggtcaacatcatccgagactacagagaagacattgacgtgaacagagctttctggcctcgagaaatctggcacaagtacgccgaagaaatgcgagatttcaaggacccgaagtattccaagaaggccttgcattgcacctccgatctggttgcaaatgccctcggacatgccacagactgcctcgattacctcgacaacgtcaccgatccttcaaccttcactttctgcgccattccccaggtcatggccattgctaccctggacttggtctaccgaaaccccgacgttttccagaagaacgtcaagttgcgcaagggaactactgtcagcctgattcttgaggccagcaacgtttctggagtatgtgacattttcactcgatacgcccggaaggtgtacaagaagtccgaccccaatgaccccaactacttccgagtgtctgtgctctgcggtaagatcgagcagcatgcggctctgatcaagagacagcgaggaccccccgctaaaaccattgcacaactggaaggtgaacgaaaagagatggccctgtcgctaattgtctgtttagcagttatcttctcgatgtctggactgatggcttatatcgcctacgtgtctggattcagatggtcaccccgagagattttcgactctaagatgtttcctctgagagattag

SEQ ID NO: 1002 - protein, 445 aa, Yarrowia lipolytica
MGKLIELLLHPSELSAAIHYKLWRQPLHPRDLSKESTELRRCYELLDVCSRSFAAVIRELHPEVRDAVMLFYLILRALDTIEDDMTLSRDIKIPILRDFTKCMKTPGWKFTDSDPNERDRVVLQEFPVVMTEFNKLKPKYQEVIYDITDRMGNGMADYVIDDDFNNNGVDTIAAYDLYCHHVAGIVGEGLTRITILAGFGTDVLHENPRLQESMGLFLQKVNIIRDYREDIDVNRAFWPREIWHKYAEEMRDFKDPKYSKKALHCTSDLVANALGHATDCLDYLDNVTDPSTFTFCAIPQVMAIATLDLVYRNPDVFQKNVKLRKGTTVSLILEASNVSGVCDIFTRYARKVYKKSDPNDPNYFRVSVLCGKIEQHAALIKRQRGPPAKTIAQLEGERKEMALSLIVCLAVIFSMSGLMAYIAYVSGFRWSPREIFDSKMFPLRD

SEQ ID NO: 1003 - DNA, 1242 bp, Glycine max
  CDS (1)..(1242)
atgggaagtttgggagcgattctgaaacatccagatgacttttaccctctgctgaagctgaaaatggcggcgaggaacgccgagaagcagatcccgccggagccgcactgggcgttctgctacacaatgctccacaaggtttctcgaagtttcgccctcgtcattcagcaactcggcaccgagcttcgcaacgccgtttgcatattttatttggttctgcgagctctcgacaccgttgaggatgatactagcatagaaacagatgtcaaggtgccaatactgatagcctttcaccgtcatatttatgatcgtgattggcacttttcatgtggcacaaaggagtacaaagttctaatggaccagtttcatcatgtttcaactgcttttctggaacttggaaagaactaccaggaagcaattgaggacattaccaaaagaatgggtgctggaatggccaaatttatttgcaaggaggtagaaacaattgatgactatgatgaatattgtcactatgtggcaggacttgttgggctgggtttatcaaagcttttccatgcatctggttcagaagatctggctccagatgacctttccaattcaatgggcttgtttctacagaaaacaaacattattcgagattatctggaagacatcaatgagatccccaagtcacgcatgttttggccacgacagatttggagtgaatatgttaacaaacttgaggatttgaaatatgaggagaactctgttaaggcagtgcaatgcttaaatgacatggtcactaatgctctgatgcatgctgaagattgcttaaaatacatggctgctttacgtgacccgcctatatttcgcttttgtgctataccccagataatggcaattggaacacttgcattatgctacaacaacattgaggtcttcagaggtgtagttaaaatgaggcgaggtttaactgccaaagtgattgaccgaacaaagactatggctgatgtctacggtgctttttttgattttgcttctatgttggagcccaaggttgacaaaaacgatcccaatgcaacaaaaacattgagcaggctggaagctatacagaaaacttgcagagaatctggtctcttaagtaaaaggaaatcttacattgtgaatgatgaaagtggatatggctcaaccatgattgtcatattggtcatcatggtttccatcatttttgcttatctgtctgctaaccaccataatagctag

SEQ ID NO: 1004 - protein, 413 aa, Glycine max
MGSLGAILKHPDDFYPLLKLKMAARNAEKQIPPEPHWAFCYTMLHKVSRSFALVIQQLGTELRNAVCIFYLVLRALDTVEDDTSIETDVKVPILIAFHRHIYDRDWHFSCGTKEYKVLMDQFHHVSTAFLELGKNYQEAIEDITKRMGAGMAKFICKEVETIDDYDEYCHYVAGLVGLGLSKLFHASGSEDLAPDDLSNSMGLFLQKTNIIRDYLEDINEIPKSRMFWPRQIWSEYVNKLEDLKYEENSVKAVQCLNDMVTNALMHAEDCLKYMAALRDPPIFRFCAIPQIMAIGTLALCYNNIEVFRGVVKMRRGLTAKVIDRTKTMADVYGAFFDFASMLEPKVDKNDPNATKTLSRLEAIQKTCRESGLLSKRKSYIVNDESGYGSTMIVILVIMVSIIFAYLSANHHNS

SEQ ID NO: 1005 - DNA, 1242 bp, Glycine max
  CDS (1)..(1242)
atgggaagtttgggagcgattctgaagaatccacatgacttttaccctatgctgaagctgaaaatggcggcgagaaacgccgagaagcagatcccgccggagccacattgggcgttctgctacacaatgctccacaaggtttctcgaagtttcgccctcgtcattcagcaactcggcaccgagcttcgcaacgccgtttgcatattttatttggttctgcgagctctcgacaccgttgaggatgatactagcatagaaacagatgtcaaggtgccaatactgatagcctttcaccgtcatatttatgatcgtgattggcacttttcatgtggcacaaaggagtacaaagttctaatggaccagtttcatcatgtttcaactgcttttctggaacttggaaagaactaccaggaagcaattgaggacattaccaaaagaatgggtgctggaatggccaaatttatttgcaaggaggtagaaacaattgatgactatgatgaatattgtcactatgtggcgggacttgttgggctgggtttatcaaagcttttccatgcgtctggttcagaagatctggctccagatgacctttccaattcaatgggcttgtttctacagaaaacaaacattattcgagattatctggaagacatcaatgagatccccaagtcacgcatgttttggccacgacagatttggagtgaatatgttaacaaacttgaggatttgaaatatgaggagaactctgttaaggcagtgcaatgcttaaatgacatggtcactaatgctctgatgcatgctgaagattgcttaaaatacatggctgctttacgtgacccgcctatatttcgcttttgtgctataccccagataatggcaattggaacacttgcattatgctacaacaacattgaggtcttcagaggtgtagttaaaatgaggcgaggtttaactgccaaagtgattgaccgaacaaagactatggctgatgtctacggtgctttttttgattttgcttctatgttggagcccaaggttgacaaaaacgatcccaatgcaacaaaaacattgagcaggctggaagctatacagaaaacttgcagagaatctggtctcttaagtaaaaggaaatcttacattgtgaatgatgaaagtggatatggctcaaccatgattgtcatattggtcatcatggtttccatcatttttgcttatctgtctgctaaccaccataatagctag

SEQ ID NO: 1006 - protein, 413 aa, Glycine max
MGSLGAILKNPHDFYPMLKLKMAARNAEKQIPPEPHWAFCYTMLHKVSRSFALVIQQLGTELRNAVCIFYLVLRALDTVEDDTSIETDVKVPILIAFHRHIYDRDWHFSCGTKEYKVLMDQFHHVSTAFLELGKNYQEAIEDITKRMGAGMAKFICKEVETIDDYDEYCHYVAGLVGLGLSKLFHASGSEDLAPDDLSNSMGLFLQKTNIIRDYLEDINEIPKSRMFWPRQIWSEYVNKLEDLKYEENSVKAVQCLNDMVTNALMHAEDCLKYMAALRDPPIFRFCAIPQIMAIGTLALCYNNIEVFRGVVKMRRGLTAKVIDRTKTMADVYGAFFDFASMLEPKVDKNDPNATKTLSRLEAIQKTCRESGLLSKRKSYIVNDESGYGSTMIVILVIMVSIIFAYLSANHHNS

SEQ ID NO: 1007 - DNA, 1242 bp, Glycine max
  CDS (1)..(1242)
atgggaagtttgggagcgattctgaagaatccagatgacttttaccctctgctgaagctgaaaatggcggcgagaaacgccgagaagcagatcccgccggagccacattgggcgttctgctacacaatgctccacaaggtttctcgaagtttcgccctcgtcattcagcaactcggcaccgagcttcgcaacgccgtttgcatattttatttggttctgcgagctctcgacaccgttgaggatgatactagcatagaaacagatgtcaaggtgccaatactgatagcctttcaccgtcatatttatgatcgtgattggcacttttcatgtggcacaaaggagtacaaagttctaatggaccagtttcatcatgtttcaactgcttttctggaacttggaaagaactaccaggaagcaattgaggacattaccaaaagaatgggtgctggaatggccaaatttatttgcaaggaggtagaaacaattgatgactatgatgaatattgtcactatgtggcgggacttgttgggctgggtttatcaaagcttttccatgcgtctggttcagaagatctggctccagatgacctttccaattcaatgggcttgtttctacagaaaacaaacattattcgagattatctggaagacatcaatgagatccccaagtcacgcatgttttggccacgacagatttggagtgaatatgttaacaaacttgaggatttgaaatatgaggagaactctgttaaggcagtgcaatgcttaaatgacatggtcactaatgctctgatgcatgctgaagattgcttaaaatacatggctgctttacgtgacccgcctatatttcgcttttgtgctataccccagataatggcaattggaacacttgcattatgctacaacaacattgaggtcttcagaggtgtagttaaaatgaggcgaggtttaactgccaaagtgattgaccgaacaaagactatggctgatgtctacggtgctttttttgattttgcttctatgttggagcccaaggttgacaaaaacgatcccaatgcaacaaaaacattgagcaggctggaagctatacagaaaacttgcagagaatctggtctcttaagtaaaaggaaatcttacattgtgaatgatgaaagtggatatggctcaaccatgattgtcatattggtcatcatggtttccatcatttttgcttatctgtctgctaaccaccataatagctag

SEQ ID NO: 1008 - protein, 413 aa, Glycine max
MGSLGAILKNPDDFYPLLKLKMAARNAEKQIPPEPHWAFCYTMLHKVSRSFALVIQQLGTELRNAVCIFYLVLRALDTVEDDTSIETDVKVPILIAFHRHIYDRDWHFSCGTKEYKVLMDQFHHVSTAFLELGKNYQEAIEDITKRMGAGMAKFICKEVETIDDYDEYCHYVAGLVGLGLSKLFHASGSEDLAPDDLSNSMGLFLQKTNIIRDYLEDINEIPKSRMFWPRQIWSEYVNKLEDLKYEENSVKAVQCLNDMVTNALMHAEDCLKYMAALRDPPIFRFCAIPQIMAIGTLALCYNNIEVFRGVVKMRRGLTAKVIDRTKTMADVYGAFFDFASMLEPKVDKNDPNATKTLSRLEAIQKTCRESGLLSKRKSYIVNDESGYGSTMIVILVIMVSIIFAYLSANHHNS

SEQ ID NO: 1009 - DNA, 1212 bp, Zea mays
  CDS (1)..(1212)
atgggggcgctgtcgcggccggaggaggtgctggcgctggtgaaattgcgggtggcagcggggcagatcaagcgtcagatcccgcccgaggaacactgggccttcgcctactccatgctccagaaggtctcccgcagcttcgccctcgtcatccagcagctcgggcccgaactccgcaatgccgtgtgcatcttctacctcgtgctccgtgccctcgacaccgttgaggatgacactagcatcccgaccgaggtgaaggtgcccatcctccaggaattttatcggcacgtctacaaccgcgactggcattattcatgtggaacaaatcactacaaagtgctgatggataagtttcacctcgtatccactgccttcctggagcttggtcaaggctatcaaaaggcaatcgaagaaatcactaggcgaatgggagcaggaatggcaaaatttatatgcaaggaggttgaaactgttgatgactatgacgagtattgtcactatgtagccgggctagttggttatggactttccaggctcttttatgctgctgggacagaagatctggctccagattcactatcaaattcaatgggtctatttttacagaaaactaacataattagggactatttggaggacataaatgagataccaaagtcccgcatgttctggcctcgagagatatggagtaaatatgcagataaactcgaggatttcaaatatgaggaaaattccaaaaaggcagtacaatgcttgaacaatatagtgactgatgcactgattcatgctgaagagtgccttcagtacatgtcagccttgaagaaccatgccatcttccgtttttgcgcaataccccagataatggcaattggaacatgtgctctttgctacaataacgtgcatgtctttagaggagttgtaaagatgagacgtggtctcacggcacgaataattgacgagacaaattcaatgtcagacgtctataccgctttctatgagttttcttcattgatagagtcaaagattgatgacaatgatccaaatgctgctctaacacggagacacgtgaattcaataaagcaaacttgcaagtcatctggtttggtaaagaggagggggtaccatttggacacatcaccttacaggcctatgctgatcatgattgtcctcctgctggtggctatccttttcggggcactgtataccaagtga

SEQ ID NO: 1010 - protein, 403 aa, Zea mays
MGALSRPEEVLALVKLRVAAGQIKRQIPPEEHWAFAYSMLQKVSRSFALVIQQLGPELRNAVCIFYLVLRALDTVEDDTSIPTEVKVPILQEFYRHVYNRDWHYSCGTNHYKVLMDKFHLVSTAFLELGQGYQKAIEEITRRMGAGMAKFICKEVETVDDYDEYCHYVAGLVGYGLSRLFYAAGTEDLAPDSLSNSMGLFLQKTNIIRDYLEDINEIPKSRMFWPREIWSKYADKLEDFKYEENSKKAVQCLNNIVTDALIHAEECLQYMSALKNHAIFRFCAIPQIMAIGTCALCYNNVHVFRGVVKMRRGLTARIIDETNSMSDVYTAFYEFSSLIESKIDDNDPNAALTRRHVNSIKQTCKSSGLVKRRGYHLDTSPYRPMLIMIVLLLVAILFGALYTK

SEQ ID NO: 1011 - DNA, 1206 bp, Zea mays
  CDS (1)..(1206)
atgggggcgctgtcgcggccggaggaggtgctggcgctggtgaaattgcgggtggcagcggggcagatcaagcgtcagatcccgcccgaggaacactgggccttcgcctactccatgctccagaaggtctcccgcagcttcgccctcgtcatccagcagctcgggcccgaactccgcaatgccgtgtgcatcttctacctcgtgctccgtgccctcgacaccgttgaggatgacactagcatcccgaccgaggtgaaggtgcccatcctccaggaattttatcggcacgtctacaaccgcgactggcattattcatgtggaacaaatcactacaaagtgctgatggataagtttcacctcgtatccactgccttcctggagcttggtcaaggctatcaaaaggcaatcgaagaaatcactaggcgaatgggagcaggaatggcaaaatttatatgcaaggaggttgaaactgttgatgactatgacgagtattgtcactatgtagctgggctagttggctatggactttccaggctcttttatgctgctgggacggaagatctggctctagattcattgtcaaattcaatgggcctatttttacagaaaactaacataattagggactatttggaggacataaatgagataccaaagtcccgcatgttctggcctcgagagatatggagtaaatatgcagataaacttgaggacttcaaatatgaggagaactccaaaaaagcagtacaatgcttgaacaatatggtgactgatgcactgattcatgctgaagagtgccttcagtacatgtcagccttgaaggatcatgccattttccgtttttgtgcaataccccagataatggcaattggaacatgtgctctttgctacaataacgtgcatgtctttagaggagttgtgaagatgagacgtggtctcacggcacgaataattgacgagacaaactcaatgacagatgtctatactgctttctatgagttttcttcattgatagagtcaaagattgatgacagtgatccaaatgctgctctaacacagagacgtgtggattcaataaagcaaacttgcaaatcatctggtttggtaaatcaaagggggtaccatttggagaagtcaccttacaggcctatgctgatcatgattgtcctcctgctggtagctattcttttcggggtaatgttctag

SEQ ID NO: 1012 - protein, 401 aa, Zea mays
MGALSRPEEVLALVKLRVAAGQIKRQIPPEEHWAFAYSMLQKVSRSFALVIQQLGPELRNAVCIFYLVLRALDTVEDDTSIPTEVKVPILQEFYRHVYNRDWHYSCGTNHYKVLMDKFHLVSTAFLELGQGYQKAIEEITRRMGAGMAKFICKEVETVDDYDEYCHYVAGLVGYGLSRLFYAAGTEDLALDSLSNSMGLFLQKTNIIRDYLEDINEIPKSRMFWPREIWSKYADKLEDFKYEENSKKAVQCLNNMVTDALIHAEECLQYMSALKDHAIFRFCAIPQIMAIGTCALCYNNVHVFRGVVKMRRGLTARIIDETNSMTDVYTAFYEFSSLIESKIDDSDPNAALTQRRVDSIKQTCKSSGLVNQRGYHLEKSPYRPMLIMIVLLLVAILFGVMF

SEQ ID NO: 1013 - DNA, 25 bp, Artificial sequence
  primer
atgggaaagctattacaattggcat

SEQ ID NO: 1014 - DNA, 25 bp, Artificial sequence
  primer
tcacgctctgtgtaaagtgtatata

SEQ ID NO: 1015 - protein, 415 aa, Artificial sequence
  consensus sequence
  Variant (3)..(6): Xaa in position 3 to 6 is any amino acid
  Variant (7)..(13): Xaa in position 7 to 13 is any or no amino acid
  Variant (15)..(41): Xaa in position 15 to 41 is any amino acid
  Variant (42)..(51): Xaa in position 42 to 51 is any or no amino acid
  Variant (54)..(55): Xaa in position 54 to 55 is any amino acid
  Variant (57)..(59): Xaa in position 57 to 59 is any amino acid
  Variant (64)..(65): Xaa in position 64 to 65 is any amino acid
  Variant (68)..(69): Xaa in position 68 to 69 is any amino acid
  Variant (71)..(73): Xaa in position 71 to 73 is any amino acid
  Variant (76)..(77): Xaa in position 76 to 77 is any amino acid
  Variant (79)..(80): Xaa in position 79 to 80 is any amino acid
  Variant (95)..(96): Xaa in position 95 to 96 is any amino acid
  Variant (98)..(101): Xaa in position 98 to 101 is any amino acid
  Variant (103)..(103): Xaa in position 103 is any amino acid
  Variant (105)..(105): Xaa in position 105 is any amino acid
  Variant (107)..(108): Xaa in position 107 to 108 is any amino acid
  Variant (110)..(117): Xaa in position 110 to 117 is any amino acid
  Variant (119)..(119): Xaa in position 119 is any amino acid
  Variant (121)..(133): Xaa in position 121 to 133 is any amino acid
  Variant (134)..(135): Xaa in position 134 to 135 is any or no amino acid
  Variant (137)..(145): Xaa in position 137 to 145 is any amino acid
  Variant (147)..(149): Xaa in position 147 to 149 is any amino acid
  Variant (152)..(153): Xaa in position 152 to 153 is any amino acid
  Variant (155)..(156): Xaa in position 155 to 156 is any amino acid
  Variant (159)..(160): Xaa in position 159 to 160 is any amino acid
  Variant (163)..(163): Xaa in position 163 is any amino acid
  Variant (167)..(174): Xaa in position 167 to 174 is any amino acid
  Variant (175)..(182): Xaa in position 175 to 182 is any or no amino acid
  Variant (184)..(185): Xaa in position 184 to 185 is any amino acid
  Variant (189)..(189): Xaa in position 189 is any amino acid
  Variant (200)..(200): Xaa in position 200 is any amino acid
  Variant (203)..(204): Xaa in position 203 to 204 is any amino acid
  Variant (207)..(213): Xaa in position 207 to 213 is any amino acid
  Variant (214)..(215): Xaa in position 214 to 215 is any or no amino acid
  Variant (217)..(220): Xaa in position 217 to 220 is any amino acid
  Variant (221)..(224): Xaa in position 221 to 224 is any or no amino acid
  Variant (226)..(227): Xaa in position 226 to 227 is any amino acid
  Variant (243)..(243): Xaa in position 243 is any amino acid
  Variant (246)..(249): Xaa in position 246 to 249 is any amino acid
  Variant (250)..(252): Xaa in position 250 to 252 is any or no amino acid
  Variant (254)..(254): Xaa in position 254 is any amino acid
  Variant (259)..(259): Xaa in position 259 is any amino acid
  Variant (263)..(263): Xaa in position 263 is any amino acid
  Variant (264)..(273): Xaa in position 264 to 273 is any or no amino acid
  Variant (275)..(276): Xaa in position 275 to 276 is any amino acid
  Variant (277)..(277): Xaa in position 277 is any or no amino acid
  Variant (279)..(292): Xaa in position 279 to 292 is any amino acid
  Variant (293)..(299): Xaa in position 293 to 299 is any or no amino acid
  Variant (301)..(301): Xaa in position 301 is any amino acid
  Variant (303)..(304): Xaa in position 303 to 304 is any amino acid
  Variant (306)..(307): Xaa in position 306 to 307 is any amino acid
  Variant (310)..(310): Xaa in position 310 is any amino acid
  Variant (312)..(313): Xaa in position 312 to 313 is any amino acid
  Variant (315)..(315): Xaa in position 315 is any amino acid
  Variant (317)..(317): Xaa in position 317 is any amino acid
  Variant (319)..(327): Xaa in position 319 to 327 is any amino acid
  Variant (329)..(329): Xaa in position 329 is any amino acid
  Variant (336)..(336): Xaa in position 336 is any amino acid
  Variant (340)..(340): Xaa in position 340 is any amino acid
  Variant (343)..(347): Xaa in position 343 to 347 is any amino acid
  Variant (349)..(350): Xaa in position 349 to 350 is any amino acid
  Variant (352)..(355): Xaa in position 352 to 355 is any amino acid
  Variant (356)..(358): Xaa in position 356 to 358 is any or no amino acid
  Variant (361)..(361): Xaa in position 361 is any amino acid
  Variant (363)..(363): Xaa in position 363 is any amino acid
  Variant (365)..(365): Xaa in position 365 is any amino acid
  Variant (367)..(369): Xaa in position 367 to 369 is any amino acid
  Variant (371)..(378): Xaa in position 371 to 378 is any amino acid
  Variant (379)..(379): Xaa in position 379 is any or no amino acid
  Variant (381)..(383): Xaa in position 381 to 383 is any amino acid
  Variant (385)..(393): Xaa in position 385 to 393 is any amino acid
  Variant (395)..(398): Xaa in position 395 to 398 is any amino acid
  Variant (399)..(401): Xaa in position 399 to 401 is any or no amino acid
  Variant (405)..(414): Xaa in position 405 to 414 is any amino acid
MGXXXXXXXXXXXPXXXXXXXXXXXXXXXXXXXXXXXXXXXXXXXXXXXXXCYXXLXXXSRSFXXVIXXLXXXLRXXVXXFYLVLRALDTVEDDXXIXXXXKXPXLXXFXXXXXXXXWXFXXXXXXXXXXXXXXXFXXXXXXXXXLXXXYQXXIXXITXXMGXGMAXXXXXXXXXXXXXXXXTXXDYDXYCHYVAGLVGXGLXXLFXXXXXXXXXLXXXXXXXXLXXSMGLFLQKTNIIRDYXEDXXXXXXXRXFWPRXIWSXXXXXXXXXXXYXXXLXXXXXXXXXXXXXXXXXXXXXCXNXXVXXALXHXXDXLXYXXXXXXXXXFXFCAIPQXMAIXTLXXXXXNXXVXXXXXXXVKXRXGXTXXXIXXXXXXXXXVXXXFXXXXXXXXXKXXXXXXXDPNXXXXXXXXXXI

SEQ ID NO: 1016 - protein, 51 aa, Artificial sequence
  protein pattern
  Variant (2)..(6): Xaa in position 2 to 6 is any or no amino acid
  Variant (9)..(9): Xaa in position 9 is any amino acid
  Variant (11)..(11): Xaa in position 11 is Ala, Ile, Pro or Val
  Variant (12)..(13): Xaa in position 12 to 13 is any amino acid
  Variant (14)..(14): Xaa in position 14 is Ala, Cys or Val
  Variant (16)..(16): Xaa in position 16 is any amino acid
  Variant (18)..(18): Xaa in position 18 is Leu or Met
  Variant (19)..(20): Xaa in position 19 to 20 is any amino acid
  Variant (21)..(21): Xaa in position 21 is Ile, Leu or Val
  Variant (22)..(22): Xaa in position 22 is any amino acid
  Variant (23)..(23): Xaa in position 23 is Asp, Glu, Gly, Asn or Thr
  Variant (24)..(26): Xaa in position 24 to 26 is any amino acid
  Variant (28)..(28): Xaa in position 28 is any amino acid
  Variant (35)..(35): Xaa in position 35 is any amino acid
  Variant (36)..(36): Xaa in position 36 is Met or Val
  Variant (37)..(37): Xaa in position 37 is Ala or Ser
  Variant (38)..(38): Xaa in position 38 is Phe, Ile or Val
  Variant (39)..(39): Xaa in position 39 is Ala, Gly or Ser
  Variant (41)..(41): Xaa in position 41 is any amino acid
  Variant (42)..(42): Xaa in position 42 is Ala, Asp or Ser
  Variant (43)..(43): Xaa in position 43 is any amino acid
  Variant (44)..(44): Xaa in position 44 is Cys or Val
  Variant (45)..(45): Xaa in position 45 is Phe or Tyr
  Variant (46)..(46): Xaa in position 46 is any amino acid
  Variant (48)..(49): Xaa in position 48 to 49 is any amino acid
  Variant (50)..(50): Xaa in position 50 is Ile, Leu or Val
  Variant (51)..(51): Xaa in position 51 is Phe or Leu
NXXXXXALXHXXXXLXYXXXXXXXXXFXFCAIPQXXXXXTXXXXXXNXXXX

SEQ ID NO: 1017 - protein, 20 aa, Artificial sequence
  protein pattern
  Variant (2)..(3): Xaa in position 2 to 3 is any or no amino acid
  Variant (11)..(11): Xaa in position 11 is any amino acid
  Variant (18)..(18): Xaa in position 18 is any amino acid
SXXMGLFLQKXNIIRDYXED

SEQ ID NO: 1018 - protein, 42 aa, Artificial sequence
  protein pattern
  Variant (2)..(8): Xaa in position 2 to 8 is any amino acid
  Variant (9)..(10): Xaa in position 9 to 10 is any or no amino acid
  Variant (12)..(14): Xaa in position 12 to 14 is any amino acid
  Variant (15)..(16): Xaa in position 15 to 16 is any or no amino acid
  Variant (18)..(19): Xaa in position 18 to 19 is any amino acid
  Variant (20)..(20): Xaa in position 20 is Ala, Ile or Val
  Variant (22)..(22): Xaa in position 22 is any amino acid
  Variant (23)..(23): Xaa in position 23 is Asp, Glu, Asn, Arg or Ser
  Variant (26)..(27): Xaa in position 26 to 27 is any amino acid
  Variant (30)..(30): Xaa in position 30 is Ala, Asp or Asn
  Variant (34)..(34): Xaa in position 34 is any amino acid
  Variant (35)..(35): Xaa in position 35 is Phe or Tyr
  Variant (36)..(36): Xaa in position 36 is Ala, Ile, Leu or Val
  Variant (37)..(38): Xaa in position 37 to 38 is any amino acid
  Variant (39)..(39): Xaa in position 39 is Ala, Asp, Glu, Ser or Thr
  Variant (40)..(41): Xaa in position 40 to 41 is any amino acid
  Variant (42)..(42): Xaa in position 42 is Gly, Asn, Ser or Thr
FXXXXXXXXXLXXXXXYXXXIXXITXXMGXGMAXXXXXXXXX

SEQ ID NO: 1019 - protein, 26 aa, Artificial sequence
  protein pattern
  Variant (3)..(3): Xaa in position 3 is any amino acid
  Variant (4)..(4): Xaa in position 4 is Phe or Tyr
  Variant (7)..(7): Xaa in position 7 is His or Tyr
  Variant (11)..(11): Xaa in position 11 is Ile, Leu or Val
  Variant (14)..(14): Xaa in position 14 is any amino acid
  Variant (17)..(17): Xaa in position 17 is Ser or Thr
  Variant (18)..(18): Xaa in position 18 is any amino acid
  Variant (19)..(19): Xaa in position 19 is Ile, Leu or Met
  Variant (20)..(22): Xaa in position 20 to 22 is any amino acid
  Variant (23)..(23): Xaa in position 23 is Ala or Ser
  Variant (24)..(25): Xaa in position 24 to 25 is any amino acid
  Variant (26)..(26): Xaa in position 26 is Ala, Glu, Gly, Gln or Ser
YDXXCHXVAGXVGXGLXXXXXXXXXX

SEQ ID NO: 1020 - protein, 12 aa, Artificial sequence
  protein pattern
  Variant (3)..(3): Xaa in position 3 is Ile, Leu or Met
  Variant (5)..(5): Xaa in position 5 is Lys or Arg
  Variant (7)..(7): Xaa in position 7 is any amino acid
  Variant (9)..(9): Xaa in position 9 is Ala, Cys or Val
  Variant (10)..(10): Xaa in position 10 is any amino acid
  Variant (11)..(11): Xaa in position 11 is Ala, Ile, Leu or Val
VKXRXGXTXXXI

SEQ ID NO: 1021 - DNA, 942 bp, Saccharomyces cerevisiae
  CDS (1)..(942)
atggctccgtatccatacaaagtgcagacgacagtacctgaacttcaatacgaaaactttgatggtgctaagttcgggtacatgttctggcctgttcaaaatggcaccaatgaggtcagaggtagagttttactgattcatgggtttggcgagtacacaaagattcaattccggcttatggaccacttatcactcaatggttacgagtcatttacgtttgatcaaaggggtgctggtgttacatcgccgggcagatcgaaaggtgtaactgatgagtaccatgtgtttaacgatcttgagcattttgtggagaagaacttgagtgaatgtaaggccaaaggcatacccttgttcatgtgggggcattcaatgggcggtggtatctgcctaaactatgcctgccaaggtaagcacaaaaacgaaataagcggatatatcgggtcaggcccattaataattttacatccgcatacaatgtataacaagccgacccaaattattgctccattattggcgaaatttttaccaagggtaaggatcgacactggtttagatcttaaaggaatcacatctgataaagcctatcgtgctttcctcggaagcgatcctatgtctgttccactatatgggtcgtttaggcaaatacacgactttatgcaacgtggtgccaagctctacaagaatgaaaacaattatattcagaagaacttcgctaaagacaaacccgttattattatgcatggacaagacgacacaatcaacgatcctaagggctctgaaaagttcattcgggactgtccttctgctgacaaagaattaaagctgtatccgggcgcaagacattcgattttcccactagagacagataaagtcttcaacacggtgttcaatgatatgaagcaatggttggacaaacacaccacgaccgaagctaaaccataa

SEQ ID NO: 1022 - protein, 313 aa, Saccharomyces cerevisiae
MAPYPYKVQTTVPELQYENFDGAKFGYMFWPVQNGTNEVRGRVLLIHGFGEYTKIQFRLMDHLSLNGYESFTFDQRGAGVTSPGRSKGVTDEYHVFNDLEHFVEKNLSECKAKGIPLFMWGHSMGGGICLNYACQGKHKNEISGYIGSGPLIILHPHTMYNKPTQIIAPLLAKFLPRVRIDTGLDLKGITSDKAYRAFLGSDPMSVPLYGSFRQIHDFMQRGAKLYKNENNYIQKNFAKDKPVIIMHGQDDTINDPKGSEKFIRDCPSADKELKLYPGARHSIFPLETDKVFNTVFNDMKQWLDKHTTTEAKP

SEQ ID NO: 1023 - DNA, 1623 bp, glycine max
  CDS (103)..(1185)
gcgttcgtgctgcttcggagagtcgccaagtttctgaaaggttgtgattgatctgatcctctatatttggcattggcattggactatttttgggaagaagtaatggcagtgggaatgggaagtgagggtatggttttgaccacgttgattttgacgtccggggccagcggccgaatccttggcttcttcaacgccctccttttgctccttctctatctcttccccaccaccaccatgcgcctcgcctcctggaagagtacctccacgtggacgtcgtcgaggagggcgttggccattcggagggtgttggaggatgcagattcagatggaaccacattcagggagtaccatctcttttcaacctcaaggtgtgacaccatttttacccagtcttggattcctcgctctcctagcaataccatcaggggacttgttattcttatgcatggacttaatgaacacagtggcagatatactcatttcgcaaagcacctcaatgctaatggtttcaaggtttacgggatggattggcttggccacggtggaagtgatgggttgcatggttatgtccattctcttgatgatgttgtttctgatacgaaaatatttttggagaaggttcttaacgaaaatcctgggcttccatgtttctgctttggacactcaacaggagcagccattattcttaaggctctgcttgacccaaaggttgaatctcgcatagctggtgctgttttgacatcaccagcagttggtgtttccccttctcatccaattttgctggcacttgctcctatagcttcaattttgctgccaacgtatcaatgtagttctgcatataagaaggggtcaccagtgtctagagacccagaggcgctaattgctaaatattctgatccattagtatgtactggacctcttagagtacgtactggttatgagattctcagaattacaagctacttgcagcgaaatctgagaaaattgagagttccattttttgttctccatggcactgctgattccgtgactgatcccattgcttcacaaaaattatatgtagaagcctcctcatctgacaaaactatcagactatacgatggtttcttacatgacctgctctttgaacccgaacgagatgctatcacacaggacataattcaatggctaaacaatagagtatgaatatactaagtaggtgtcagtgaaaatatatcatgaaaattgaagaagcacctttgtcttgggtgggtaatttctgcctctttgtagaggaaagaaatttgaagctgaagctgcataaattgaggcattcttttatcttgaaatcttaagaccatatatcagcttcttttatggttaggatcttttctccgatccagtagttatccatggagcgcagtaagtatataccttcagttagtttttttttcctttgtcaagtttgtccatagaaagtatgtaccattttctttgtcgatcattttttgtgatgattattagcatttgtgccaaccaacaagtgggccagtgcttgcactgtttaaattgtaataacaaagttttatatcatttggctcggttgaagttttaaacatgttatttccaaaaaaaaaaaaaaaa

SEQ ID NO: 1024 - protein, 360 aa, glycine max
MAVGMGSEGMVLTTLILTSGASGRILGFFNALLLLLLYLFPTTTMRLASWKSTSTWTSSRRALAIRRVLEDADSDGTTFREYHLFSTSRCDTIFTQSWIPRSPSNTIRGLVILMHGLNEHSGRYTHFAKHLNANGFKVYGMDWLGHGGSDGLHGYVHSLDDVVSDTKIFLEKVLNENPGLPCFCFGHSTGAAIILKALLDPKVESRIAGAVLTSPAVGVSPSHPILLALAPIASILLPTYQCSSAYKKGSPVSRDPEALIAKYSDPLVCTGPLRVRTGYEILRITSYLQRNLRKLRVPFFVLHGTADSVTDPIASQKLYVEASSSDKTIRLYDGFLHDLLFEPERDAITQDIIQWLNNRV

SEQ ID NO: 1025 - DNA, 1645 bp, Oryza sativa
  CDS (255)..(1364)
ggcggtttcttcctcctcctcctctctctctctctcctctgcttctctcccaaattcgccacctctcctcctcctctgatccctccccacgccgccggcgagggcacggccacaacggccgcggcggcctccgtgcgccggagacaactagactactacaactactactactactactactactctttctctctcttgttgagaggagcggagatccatccgtgcaggctccggggggtggtttcgtgtgggatatgccacacgtgcagtcagctcctgcggcggcgaccgcggcggggatgtccgcggcgtcggcgcccgcgccgaggaggtgggaaggggtggaccaggcgctggagcggatggtgctcagggcgtgcctcgaccaggcgcccgagcgccgccgcgtccgcgacgcgttcaaggacgtgcagctcagcatcgaccactgcctcttcaagggacagtatagcgatattggaacaaaggagtcatacgagaaaaactccaggggcgtggagattttctcaaaatgttggtatccagagaatcatcgcataaaagcaattgtttgtctctgccatggttatggagatacctgtaccttttttctcgatggtattgctaggaagattgcttcagctggatatggagtgtttgcattagattaccctggttttggtctctcggaaggacttcatggatttataccaagttttgacactcttgttgatgatgtagcagaacattttactaaggtcaaagaaaatcctgaacatagaggtcttccaagctttctgtttggtcaatctatgggtggagcagttgcattgaagattcattttaagcaaccaaatgaatgggatggtgcaatactagttgcgcccatgtgcaagattgcagatgatgtgattccgccttggcctgttcagcaagttctaatttttatggctagacttcttccaaaagagaagcttgttccacaaaaagatttagcagagttggctttcaaagagaagaaaaaacaggagcagtgttcttataatgtgattgcgtacaaggataaaccacgtctccgaacagctttggagatgctgagaaccacaaaggaaatcgagagtcgtttggaggaggtttcgctgcccattatcattttgcatggtgagggtgatttggtcacagacccagctgtgagtaaagctctctatgataaagcgaagagctcagataagacgcttcgcctttataaagatgcatatcacgctatcttggaaggtgaaccagatgaggcaatttttcaagtcctcgatgatataatttcttggctggatcagcattctacaaagaaagttccatcgtcataaactgcaaaggcagcattgggaaaatttctttgctactgatgtatccttcgttgccgttgatccaagattccaacagttgcgattccattttggcaccagccctgtcatgtttcttttctgattgcaaatgtgcctgttgctcatcaagctgtgtacataatgtatattatccatcacaatttgtttcacaaaatttaggtaaggttttgcatgccatatataaatttgtaatatattcaaatgtttttctcgttatgtaatattttttagatttgattgcc

SEQ ID NO: 1026 - protein, 369 aa, Oryza sativa
MPHVQSAPAAATAAGMSAASAPAPRRWEGVDQALERMVLRACLDQAPERRRVRDAFKDVQLSIDHCLFKGQYSDIGTKESYEKNSRGVEIFSKCWYPENHRIKAIVCLCHGYGDTCTFFLDGIARKIASAGYGVFALDYPGFGLSEGLHGFIPSFDTLVDDVAEHFTKVKENPEHRGLPSFLFGQSMGGAVALKIHFKQPNEWDGAILVAPMCKIADDVIPPWPVQQVLIFMARLLPKEKLVPQKDLAELAFKEKKKQEQCSYNVIAYKDKPRLRTALEMLRTTKEIESRLEEVSLPIIILHGEGDLVTDPAVSKALYDKAKSSDKTLRLYKDAYHAILEGEPDEAIFQVLDDIISWLDQHSTKKVPSS

SEQ ID NO: 1027 - DNA, 1485 bp, Oryza sativa
  CDS (64)..(1251)
aaaaacgcgcaaaggaaaaaagaaagaaaaagtaaaacgaaggggaggagtcggccggcggccatggagggcggaggaggaggaggggaggagatgatgatgacgtcgggggcgacggggcggatcgtgccggtgttccgctccgtgctgtcgcggcgggcgctgctccgcctcgccgtcgcgctgcactcgctgctcctgtgggtgttcctcctcgtcggcggcggcggctggcggcggaggcggggcgatgcgggggagggggcggaggcggggagggcggtgaggacgcggaggagggcggcggagaaggaggacgtgcggcggaggagggcgctcgcggaggaggtggccatggtggaggacgcggacggggagggggcgaggcggtgggagacgttcgtcgtccccggggcgaggaggaacgcgctcttctgccgcgtctgggcgcccgccgccgccgccgccgagatgaggggtattttggtcatcatacatgggcttaatgagcacagtggaaggtatttgcactttgcggagctgctcacatcatgtggctttggagtatatgcaatggactggataggccatggtggaagcgatggtctacatggttatgtgccttcactagattatgttgtagaagatatagatgtacttcttggtaaaattgtgcttgagaatccaggggtcccctgttttcttcttggtcactccactggtggagctgttgttttgaaggcatcattgttccctcgtatcagagcaaaactggaaggcatcatcctaacttcaccagctctgcgtgtaaaacctgctcatcccattgtaggggctgtggcgccaatattctctctgttagcaccaaagtttcagttcaagggagctaacaagagaggcatcccggtgtcccgcgacccggctgccctgctagcgaagtactccgatccgctggtttacaccgggccgatcagagttcggaccggccatgaaatcctacgcatctcctcctacctgctgcacaacttgaagaaggtcaccgtcccattcatggtcctccatggaaccgcagaccgggtgaccgaccccctggcttcacaggacctctacaacgaggcctcatcgaggcacaaggatctgaggctgtacgatgggttcttgcacgatctgctctttgagcctgagcgtgatgagatcgccacagacatcatcgactggatggagcgaatgctagctctgcaaaccgtgtgaaggagagcagtttgcctgaaaaaggagaaaagaaaaattgtatgataagttaggaaaatggccgtgtatgtcattgatctcattcttgatggaattatctgaaagtgatctacaagcttcaagtggtgattttggttgattgtttcatgtaggactgggtcgaaaactgaaaaagggtttgtgatctgtaattatatatatacacccgcaataatagaattaagatttttaagg

SEQ ID NO: 1028 - protein, 395 aa, Oryza sativa
MEGGGGGGEEMMMTSGATGRIVPVFRSVLSRRALLRLAVALHSLLLWVFLLVGGGGWRRRRGDAGEGAEAGRAVRTRRRAAEKEDVRRRRALAEEVAMVEDADGEGARRWETFVVPGARRNALFCRVWAPAAAAAEMRGILVIIHGLNEHSGRYLHFAELLTSCGFGVYAMDWIGHGGSDGLHGYVPSLDYVVEDIDVLLGKIVLENPGVPCFLLGHSTGGAVVLKASLFPRIRAKLEGIILTSPALRVKPAHPIVGAVAPIFSLLAPKFQFKGANKRGIPVSRDPAALLAKYSDPLVYTGPIRVRTGHEILRISSYLLHNLKKVTVPFMVLHGTADRVTDPLASQDLYNEASSRHKDLRLYDGFLHDLLFEPERDEIATDIIDWMERMLALQTV

SEQ ID NO: 1029 - DNA, 1482 bp, Oryza sativa
  CDS (356)..(1411)
gggttgcgtctcctccacacgctagcgagtagctatacaacgtacctttcccttcctcttgctcctcctcgtcgtcgtcttgctcgtcctgcctgatcaatctttctcgctcttatctcctctcatctctcaatctctctcagataattaaaccaagtgtgcagatagatatatagctgctgctgcatgtgtagggattgcctctgacatattactattccttgcatgcgaaagagagactagctcttgtcactctcctctgcccttcttccttcgattcaagaaggcacagtagtgtgtatatatatacaggcatacataccgttcttgccgcctctagtttgggtgtgattgaatgacaaaggagatggccgatgatgtcgagtaccatgaggagtttgtgacgaatccgagggggttgcggctcttcacatgcggctggcttcctgcttcttcctcccccaaggcgctcatcttcctttgccatggctacggcatggaggtcagtggcttcatgaaagcatgtggggtcgagctggccacggcgggttacggcgtgttcggcatcgattatgaggggcatggcaagtccatgggtgccagatgctacatccagaagttcgagcatcttgtcgatgactgcgacagattcttcaaatcaatatgtgagctggaggagtacagagacaagagccggttcctgtacggggagtcgatgggcggcgcggttgcgctgctgctgcaccgcaaggacccaaccttctgggacggcgccgtcctcgtcgcgccgatgtgcaagatatcggagaaggtgaagccgcatccgttggtggtgacgctcctgacgcaggtggaggagatcatccccaagtggaagatcgtccccaccaaggacgtcatcgactctgccttcaaagaccccatcaagcgcgaaaagatcaggaagaacaagctgatctaccaggacaagcccaggctgaagacggcgctggagctgctgcgaaccagcatcagcgtcgagcaaagcttgtcacaggtgagcatgccgttcttcatcctgcacggcgaggccgacaaggtgacggacccggaggtgagccgtgcgctgtacgagcgcgccgccagcgccgacaagaccatcaagctctacccggggatgtggcacggcctcaccgccggcgagccggaccacaacgtccacctcgtcttctccgacatcgtcgcctggctcgaccgccgcagccaccaccaggacagggcgagcattaccccgccggcggcctgcaccgacagcgccgccgccgctgcggcggacagcccagtgtcgcctgagccgccgcggcaaggcgccgccggcggcttcctctgcggcctaaccggccgagcaaatccccagcaatgtaggatgtaaaatatagaaagaggggaaaaaaaaagaactcccttgatatacaaaatgaaaggaatgcagatgttgtgatg

SEQ ID NO: 1030 - protein, 351 aa, Oryza sativa
MTKEMADDVEYHEEFVTNPRGLRLFTCGWLPASSSPKALIFLCHGYGMEVSGFMKACGVELATAGYGVFGIDYEGHGKSMGARCYIQKFEHLVDDCDRFFKSICELEEYRDKSRFLYGESMGGAVALLLHRKDPTFWDGAVLVAPMCKISEKVKPHPLVVTLLTQVEEIIPKWKIVPTKDVIDSAFKDPIKREKIRKNKLIYQDKPRLKTALELLRTSISVEQSLSQVSMPFFILHGEADKVTDPEVSRALYERAASADKTIKLYPGMWHGLTAGEPDHNVHLVFSDIVAWLDRRSHHQDRASITPPAACTDSAAAAAADSPVSPEPPRQGAAGGFLCGLTGRANPQQCRM

SEQ ID NO: 1031 - DNA, 1375 bp, Glycine max
  CDS (118)..(1158)
gtaacttcttgttgcttttcacttatagttaacaactttcatcactaccattacgtgcattacagatccatcattcatcccaagttggtggaaggcgttggcttcgatctttttgatatggatttagagtttgaatatcaagaagaatacaggaggaactcaaggggagtgcaactcttcacttgcaaatggttgcctttctcttctccgaagggcctggttttcctttgccatggttatggtatggaatgcagtggcttcatgagagaatgtggtcgtccgctagcgtgtgccaaatatgctgtgttcggtatggattatgaagggcatggacgttctgaaggtgctcgttgttacataaaaaaatttgataacatcgttaacgattgttatgactttttcaagtcagtcagcgagctgcaagagtataaggcaaaggctagattcttgtatggagagtccatgggaggagcagtgagccttcttttacataaaaaggacccttcattctgggacggtgcagttctcgtcgcacccatgtgtaagatatcagagaaggtgaagccacacccggtggtggtcaacatattaactaaagttgaagatataatcccaaagtggaagatagttcccacaaaggatgtcatcgattcagcctttaaagaccctgctaaacgagagaggataaggaaaaacaagttgatataccaggacaagccaaggctaaaaacagcattagaaatgttgagaatcagcatgagccttgaagacagcttatataaggtgaccctgccgttttttgtattgcatggagaagctgatacagtgacagatccagaagtaagcagggcattatatgagcgagccagtagcaaagataagaccataaaattgtaccctggaatgtggcatggcttaacatcgggggagactgatgagaacatcgaaaaagtctttgcagacattataatgtggctagacaagcacaccagcaatgccactcatgcttcatcacaacaaattgagacttgtaactatgggattgagagatttacaacagttgcatcatcaccaaagattgtaaagcaagcaaacgggcgaagaagctatctttgtgggttgaaaggaaaccgcatgctataccactcagcaatttaaaattttaaattgttgtgctactatggtagggagttagggactgtgatcatgtggcatgtacctatataccgttttattatgtggccatttccccgtgctcgcctaattggtaggagtccacttacaaaaagtaaagcgaaatgtggcaaagctccaaatagcgtcgtttcacaaaatttccattgcgttaacatcaataacaaaattcgatgatact

SEQ ID NO: 1032 - protein, 346 aa, Glycine max
MDLEFEYQEEYRRNSRGVQLFTCKWLPFSSPKGLVFLCHGYGMECSGFMRECGRPLACAKYAVFGMDYEGHGRSEGARCYIKKFDNIVNDCYDFFKSVSELQEYKAKARFLYGESMGGAVSLLLHKKDPSFWDGAVLVAPMCKISEKVKPHPVVVNILTKVEDIIPKWKIVPTKDVIDSAFKDPAKRERIRKNKLIYQDKPRLKTALEMLRISMSLEDSLYKVTLPFFVLHGEADTVTDPEVSRALYERASSKDKTIKLYPGMWHGLTSGETDENIEKVFADIIMWLDKHTSNATHASSQQIETCNYGIERFTTVASSPKIVKQANGRRSYLCGLKGNRMLYHSAI

SEQ ID NO: 1033 - DNA, 984 bp, Glycine max
  CDS (1)..(984)
atggcgactgaagctgagttcgaatatgaagaggcgagtgaagctgagatcaaatatgatgaggaatacgtacagaattctcgaggcttgaagctttttgcatgccgatggcttccggcgaatggaagtccaaaagcgttaatcttcctgtgccatggctacgccatggaatgcagcatcacaatgaaaagcacaggaacaaggctcgcaaaagcgggttttgcagtgtatgggattgattatgaagggcatggaaaatcagaaggggttcctggccttgttatgaattttgattttgtcatcgacgattgctcccaacatttcactagaatttgtgaaaaagcagagaacaagaaaaagatgaggtacttgatgggggaatccatgggaggagctgtggctttacttttgcataggaaaaagccagaatactgggatggggcaattttggtcgcacccatgtgcaagattgcagaagaaatgaaacccaacacaatggtgattagtgtattgagtgcacttagcagagtttttccctcgtggagaatagttccgaccccagatatcattgatctcgcctttaaagtgcctaaagtcagagaagagattagagccaaccggtattgctacaaaggaaatcctcgtttgagaacagcctacgaacttctgagggtcagtacagaaattgagcaaagtctgcatgaggtttcactaccctttatagttttacatggtgaggaagatcaagtgactgataaagcagttagcaaacaactatatgatgaggcggcaagctcagataagacactaaagtcgtatccagaaatgtggcacggtctattgtatggagagccaccacaaaatttgcagattgtattctccgatattattggttggatagaccagaaatctcgctatggaaatacacgattggagagagagctaaaagaagaacacgaacatttgttcaagtctgatctctag

SEQ ID NO: 1034 - protein, 327 aa, Glycine max
MATEAEFEYEEASEAEIKYDEEYVQNSRGLKLFACRWLPANGSPKALIFLCHGYAMECSITMKSTGTRLAKAGFAVYGIDYEGHGKSEGVPGLVMNFDFVIDDCSQHFTRICEKAENKKKMRYLMGESMGGAVALLLHRKKPEYWDGAILVAPMCKIAEEMKPNTMVISVLSALSRVFPSWRIVPTPDIIDLAFKVPKVREEIRANRYCYKGNPRLRTAYELLRVSTEIEQSLHEVSLPFIVLHGEEDQVTDKAVSKQLYDEAASSDKTLKSYPEMWHGLLYGEPPQNLQIVFSDIIGWIDQKSRYGNTRLERELKEEHEHLFKSDL

SEQ ID NO: 1035 - DNA, 1471 bp, Glycine max
  CDS (50)..(1030)
cgcccacgcgtccgtacggctgcgagaagacgacagaaggggaatcgcaatggcaccggaatcagaggctccccctaacttctggggccacaccccggaagaagaatactacacctcccaaggcgttcgcaacaccaagtcccacttcgaaacccccaacggcaaaatcttcacccagtccttcctccctctcaacctccaaccccaccaagtcaaagccaccgtctttatgacccacggctacggctccgacaccggctggctcttccagaaaatctgcatcaacttcgccacctggggctacgccgtcttcgccgccgacctcctcggccacggccgctccgacggtctccagtgctacctcggcgacatggacaaaatcgccgccacctccctctccttcttcctccacgtccgcaatagccacccctacaaaaacctcccggcattcctcttcggcgagtccatgggaggactcgccacgctcctcatgtacttcaaatcggaaccggacacgtggacgggcctgatgttctccgcgccactcttcgtgattcccgaggacatgaaacccagcagggtacatttgttcatgtacggtctcttgttcggtctcgccgacacgtgggcggccatgccggataacaaaatggtcggaaaggccatcagggatcccgagaagttgaaggtcatagcgtcgaacccgaggcgctacacgggcccacccagggtggggaccatgcgggagctgcttagggtgacacagtatgtacaggataatttctccaaggtaacgacgccgtttttcactgctcacggaacttctgacggcgttacctgcccttcctcgtccaagctgctgtatgagaagggttccagtgaggataagacgttgaagctctacgatggaatgtatcactctttgattcagggagagcccgatgagtctgcgaatctcgtgttgggggacatgagagagtggattgatgagagggttcgacggtatggacctaacaaaaattcccagtgaaacaaaccattactaaattcctattttggttccacattgcatattttgtgtctatcaaaactttattaaagttgttatgtgaagacggaagagtatccttcttctatcatatttggatttcaatcaaaaatgacatttaatcaatccagttatcggtttcgatgcatgattaactttagtcctaatctctcaggatatagtagtaataaattcctcatagtccaggtttcaaagtttatattagtcgaaaaattatgtgaaacctaaggaagtttacaaaaatcagatagagagagatatttcaaaatatgtgtttgtttcggctaaatcggtaaatgcatataaaaacgtaacgaggatgccttagaaatcccaataaagtagatcaatgatactttttaatgaattttttttttattttccttccccaatcagggtttt

SEQ ID NO: 1036 - protein, 326 aa, Glycine max
MAPESEAPPNFWGHTPEEEYYTSQGVRNTKSHFETPNGKIFTQSFLPLNLQPHQVKATVFMTHGYGSDTGWLFQKICINFATWGYAVFAADLLGHGRSDGLQCYLGDMDKIAATSLSFFLHVRNSHPYKNLPAFLFGESMGGLATLLMYFKSEPDTWTGLMFSAPLFVIPEDMKPSRVHLFMYGLLFGLADTWAAMPDNKMVGKAIRDPEKLKVIASNPRRYTGPPRVGTMRELLRVTQYVQDNFSKVTTPFFTAHGTSDGVTCPSSSKLLYEKGSSEDKTLKLYDGMYHSLIQGEPDESANLVLGDMREWIDERVRRYGPNKNSQ

SEQ ID NO: 1037 - DNA, 2075 bp, Glycine max
  CDS (254)..(1390)
ggaattcggcatcgagcatagctacacatcaagagagtatattatcaatagctattattttctcatgtattttaatgcctcattgcattatgtttgggattatagacccttctttgagggtgtttgattctttttgctctattgaactgttgattcggccccttattacgtttgcattgagttgcgctgttccttcctcctgttgttcgtatttatttcatttacgccgccgtcgtctccgccgcagagagcgatgtcttccgtcgaaacggagatggagccactcacgtcgggggccagcaaccgcataattccgctcctcaaggccctcagagcctccctcatcttcgtctacaccttcttcctctccttcctcctcttcgtcctcccccgccgccgccgcctctcccccgcggcggggccgccctctccgaagaagcatttgaggcggcgctggctcgtgcgcgaggaggaggacacgtgccgcagaagggcgctggcgcaggacgtgggaatgggtcgcgacgaagggtggtaccgctggagcacttccatcttctacggggttcggaacaacgctctgttttgccggtcgtggttcccggttgccggtgatgttaagggcattctaatcatcattcacgggcttaatgaacacagtggaagatatgcggactttgcaaggcaattaacatcatgcaactttggtgtctatgcaatggactggataggtcatggaggtagtgatggattgcatggttatgttccatctcttgatcatgtggttgtagatacgggggctttcctggaaaagattagatcggagaatcctgggataccatgctttctctttggtcactccactgggggagctgtggtcttgaaagcggcttcccatcctcatattgaagtaatggtggaaggaattatattaacctcaccagctttacgtgtgaagccagctcatcctattgttggtgctgtagctccaattttttctctggtagctcctaggttccaattcaaaggagcaaacaaaaggggcattccagtttcgagggatccagcggctttgttggcgaagtactctgatcctttggtctacacaggacctataagggtacgaactggccacgaaatattgcggatatcctcgtacttaatgcgaaacttcaactctgtgactgtgccattctttgtcctgcacggaactgctgataaggtgactgatccactggcctcacaagatctatatgataaggcagcttcaaagttcaaagacataaagctttacgacggcttcttgcacgaccttctgtttgagcctgagcgtgaagagatagctcaggacattatcaactggatggaaaagagattatttactatttgaaaatgttagtatatatatatatatatatatgggggggttaataggaaagggaagacacaagggaagaaaaagggatgccatgtttgtaagtgtagaaaattgaagtcgccctgggaaatggggggaggcggatgcagataggtttattcatcttttcattttagtgttttgaatatatgtattgtgtgaagatctttgttttatcaagaaacttgtacattttatagacttaaatatttcagtagtgtttccatttcgcacatcctatagttggtgctgtggctccaattttttctctggtagctccaagattccaattcaaaggagcaaacaaaaggggcattccagtttcgagggatccagcagctttgttggcaaagtactctgatcctttggtctacacaggacctataagggtccgaactggccatgaaatattgcggatatcctcgtacttgatgcgaaacttcaactctgtgactgtgccattctttgtcctccatggaactgctgataaggtgactgatccactggcctcacaagatctatatgataaggcagcttcaaagttcaaagacataaagctttacgatggcttcttgcacgaccttctgtttgagcctgagcgtgaagagatagctcaggacattatcaactggatggagaaaagattatttactatttg

SEQ ID NO: 1038 - protein, 378 aa, Glycine max
MSSVETEMEPLTSGASNRIIPLLKALRASLIFVYTFFLSFLLFVLPRRRRLSPAAGPPSPKKHLRRRWLVREEEDTCRRRALAQDVGMGRDEGWYRWSTSIFYGVRNNALFCRSWFPVAGDVKGILIIIHGLNEHSGRYADFARQLTSCNFGVYAMDWIGHGGSDGLHGYVPSLDHVVVDTGAFLEKIRSENPGIPCFLFGHSTGGAVVLKAASHPHIEVMVEGIILTSPALRVKPAHPIVGAVAPIFSLVAPRFQFKGANKRGIPVSRDPAALLAKYSDPLVYTGPIRVRTGHEILRISSYLMRNFNSVTVPFFVLHGTADKVTDPLASQDLYDKAASKFKDIKLYDGFLHDLLFEPEREEIAQDIINWMEKRLFTI

SEQ ID NO: 1039 - DNA, 1254 bp, Glycine max
  CDS (96)..(1070)
ccttcggctccacgcgttgaaaattttcaattgtctattgacacgaccaatacacaaaagcacagccacaaaggcagcatcatcagagagcaacaatggaagaagaaaaagaagaccaaaagctcctgacatacccccactactggggcttcaccccagaagaggactactacaaacaacaaggaatcacatccacaagctccttcttcaccactccccaaggcctcaaactcttcacaagatcctggctcccaaaccctaacactcctccccgtgccctaatcttcatggttcacggctacggcaacgacatctcctggaccttccaatcaacccctatcttcctcgcccaaaactccttctcatgcttcgccctagacctccagggccacggccactcccagggcctcaaagcctacgtccctaacgtacacctcgccgcacacgattgcctctccttcttcaattccatcagaacccaaaaccctaacctcccttccttcctttacggcgagtccatgggcgccgcaatctccctcctcatccacctcgtcaactccgaaacggaacccaaatctcaacccttccaaggtgccgttttggtggcccccatgtgcaaaatctccgacaacgtgcgacccaaatggccaatcccgcaaatcctcactttcctatcaagattcttccccactctccccattgttcccactcccgatcttctctacaagtccgtcaaagttgaccacaaaaaagtcatcgccgacatgaaccctttgcgttaccgcgggaagcccaggttggggactgtggtggagcttcttagagtcacagatttgctgagtcggaggctctgtgatgtgagtcttccgtttattgtgcttcatggaagtgctgatgttgttactgaccctaatgtgagtagagagctttaccgtgaggcgaggagtgacgataagacgattaaggtttatgaggagatgatgcattcgttgctgtttggggaaactgatgagaatgttgagattgttaggaacgatatcttggagtggttggttgctaggtgtaagtaacaaaggaggaaacaaaacaaaccagagttgttgaatagtgaatgaaggattgtttgtttgattgttactccatttggtttggtcattgggtgaatgtgattttgcttttgatgaaatttcgttaataacgatgaatggtctgtatattgttgtttatttatgaaagaaaaaaatgttacttttt

SEQ ID NO: 1040 - protein, 324 aa, Glycine max
MEEEKEDQKLLTYPHYWGFTPEEDYYKQQGITSTSSFFTTPQGLKLFTRSWLPNPNTPPRALIFMVHGYGNDISWTFQSTPIFLAQNSFSCFALDLQGHGHSQGLKAYVPNVHLAAHDCLSFFNSIRTQNPNLPSFLYGESMGAAISLLIHLVNSETEPKSQPFQGAVLVAPMCKISDNVRPKWPIPQILTFLSRFFPTLPIVPTPDLLYKSVKVDHKKVIADMNPLRYRGKPRLGTVVELLRVTDLLSRRLCDVSLPFIVLHGSADVVTDPNVSRELYREARSDDKTIKVYEEMMHSLLFGETDENVEIVRNDILEWLVARCK

SEQ ID NO: 1041 - DNA, 1266 bp, Oryza sativa
  CDS (69)..(1058)
actacaacgccaaagcactgcactgcacaagcagcttcctcgccttcgcatctactactccccccaaaatggcgcatccggtggctgaggccgacgagaagagccccttcggccgcctcaccgcggaggagttctacgcgcgccacggcgtgctgcacacctcctccaccttcgtcaacccgcgcggcctccgcatcttcacccagcgctgggtccccgcggggggcgacgcgcccctcctcggcgccatcgccgtcgtccacggcttcacgggggagtccagctggacggtgcagctcaccgccgtccacttcgccaaggccgggttcgccgtcgccgccgtcgaccaccagggccacggcttctccgagggcctacaggggcacatccccgacatcgtccccgtgctcgaggactgcgaggccgcgttcgccccgttccgcgccgactacccgccgccgcttccgtgcttcctctacggggagtccctcggcggcgccatcgcgctgctgctccacctccgggacaaggagcggtggcgcgacggggcggtgctcaacggcgccatgtgcggggtcagccccaggttcatgcccccctggccgctcgagcacctgctgtgggcggcggcggccgtggcgcccacgtggcggctcgccttcacccgggggaacatccccgaccgctccttcaaggtgccgtggaagcgcgccctggcggtggcgagcccgcgccgcaccacggcgccgccccgcgccgccacggcgctggagctcctccgcgtgtgccgcgagctccagtcccggttcgaggaggtggagctcccgctcctggtcgtccacggcggcgaggacaccgtgtgcgaccccgggtgcgcggaggagctccaccgccgcgccgggagcaaggacaagacgctgcgggtgtacccggggatgtggcaccagctggtcggcgagcccgaggagaacgtcgacaaggtgttcggcgacgtcctcgactggctcaagtcccacgccgccgccgctgccgccgcgcgtggcgaggggcagcagtagttcggtcggtcacgcgtgccgcgtgcttgggtaattcatggcggattcaaagcaaaagtacgggggcgcaataaaaggttgtggagttgattggtgagacgagatcgatctggtcccggtgtatctccgtctctgcgtgtggccatgttccatctccgtgtctctctgctcgtattagtccatgaattgaatgccaaaaaaatttgcc

SEQ ID NO: 1042 - protein, 329 aa, Oryza sativa
MAHPVAEADEKSPFGRLTAEEFYARHGVLHTSSTFVNPRGLRIFTQRWVPAGGDAPLLGAIAVVHGFTGESSWTVQLTAVHFAKAGFAVAAVDHQGHGFSEGLQGHIPDIVPVLEDCEAAFAPFRADYPPPLPCFLYGESLGGAIALLLHLRDKERWRDGAVLNGAMCGVSPRFMPPWPLEHLLWAAAAVAPTWRLAFTRGNIPDRSFKVPWKRALAVASPRRTTAPPRAATALELLRVCRELQSRFEEVELPLLVVHGGEDTVCDPGCAEELHRRAGSKDKTLRVYPGMWHQLVGEPEENVDKVFGDVLDWLKSHAAAAAAARGEGQQ

SEQ ID NO: 1043 - DNA, 1005 bp, Oryza sativa
  CDS (1)..(1005)
atgccggacggcgagcggcatgaggaggccccggatgtgaacttctggggcgagcagccggcgacggaggctgagtactacgcggcgcacggcgcggatggcgagtcgtcctacttcaccccgccgggcgggcgccgcctcttcacgcgggcgtggcggccccgtggcgacggcgcgccgcgggcgctcgtgttcatggtgcacggctacggcaacgacatcagctggacgttccagtccacggccgtcttcctcgcccgctccggcttcgcctgcttcgccgccgacctccccggccatggccgctcccacggcctccgcgcgttcgtccccgacctcgattccgccatcgccgacctgctcgccttcttccgctccgtccggcggcgggaggagcacgccgggctgccgtgcttcctgttcggggagtccatgggcggggccatctgcctcctcatccacctccgcacgccgccggaggagtgggccggcgccgtgctggtggcgcccatgtgcaagatctccgaccggatccgcccgccatggccgctgccgcagatcctcaccttcgtcgcccgcttcgcgcccacgctcgccatcgtccccaccgccgacctcatcgagaagtccgtcaaggtgccggccaagcgcctcatcgccgcgcgcaaccccatgcgctatagcggccggccgaggctcggcaccgtcgtcgagctgctgcgcgccaccgacgagctcggcgcccgcctcggcgaagtcaccgtcccgttcctcgtcgtgcacggcagcgccgacgaggtgaccgacccggacatcagccgcgcgctgtacgacgccgccgccagcaaggacaagaccatcaagatatacgacgggatgatgcactccatgctcttcggggagcctgacgagaacatcgagcgcgtccgcgctgacattctcgcgtggctcaacgagagatgcacgccgagggaggagggcagcttcctgacaatacaagattag

SEQ ID NO: 1044 - protein, 334 aa, Oryza sativa
MPDGERHEEAPDVNFWGEQPATEAEYYAAHGADGESSYFTPPGGRRLFTRAWRPRGDGAPRALVFMVHGYGNDISWTFQSTAVFLARSGFACFAADLPGHGRSHGLRAFVPDLDSAIADLLAFFRSVRRREEHAGLPCFLFGESMGGAICLLIHLRTPPEEWAGAVLVAPMCKISDRIRPPWPLPQILTFVARFAPTLAIVPTADLIEKSVKVPAKRLIAARNPMRYSGRPRLGTVVELLRATDELGARLGEVTVPFLVVHGSADEVTDPDISRALYDAAASKDKTIKIYDGMMHSMLFGEPDENIERVRADILAWLNERCTPREEGSFLTIQD

SEQ ID NO: 1045 - DNA, 1588 bp, Zea mays
  CDS (188)..(1174)
gggtaccctcgggccggccggggattcccaccacggcgcccgcactgccttgccttctcctccccattgtttccatccgcaccggagggcggtccgatacaagcaacggcaacgcctcccctctcctccacctccccacctatattgattctgattcatccacccagcaggcagcagctacagcaagatggtgcacccgatcgcggaggccgacgagcggagccccttcggccgcctgacgccggacgagttctacgcgcgccacggcgtgacccactccgcctcgtccttcgtcaacccgcgggggctccgcatcttcacccagcgctgggtgcccagtggggacgcccccgtcctgggcgccgtcgccgtcgtgcacggcttcaccggagagtctagctggacaatccagctcaccgccgtccacctcgccgccgcgggcttcgccgtcgccgcgctcgaccaccagggccacggcttctccgagggcctccagggccacctccccgacatcaaccccgtgctcgacgactgcgacgccgccttcgcgcccttccgcgccgactacccgccgccgctcccctgcttcctctacggggagtcgctcggcggcgccatcgcgctgctgctccacctgcggaacagggacctgtggcgggacggggccgtgctcaacggcgccatgtgcggggtcagcccgaggttcaagccgccgtggccgctcgagcacctgctcgccgcagccgccgccgtcgtccccacctggcgcgtcgccttcacgcggggcaacatccccgagcgctccttcaaggtggactggaagcgggcgctcgcgctcgcctccccgcgccgcaccacggcgccgcccagggcggccacggcgctcgagctcctccgcgtctgccgcgagctgcagcggcgattcgaggaggtgcagctgccgctcctcgtcgtgcacggcgccgaggacaccgtctgcgacccggcctgcgtcgaggagctctgcaggcgcgccgggagcaaggacaagacgcttcgcatctacccagggatgtggcaccagattgtcggcgagcccgaggagaacgtggagaaggtgttcgacgatatcatagactggctcaaggcacgcgccaccgctacagccgcgggcgcgcaccacggcgagcagtagtttgggcacgcctcctgcgtgcgtgcgtgccatggccaggcttgccttcaaccgcgcgtggtccattcaccatcccagattctatcctaggttccttccagctatattcgagtacggatccagcaataaacttgtgctgtctgctgattacagaatttgtttttgctccaatactacgagatctcgtctgatggtcccgatccgccatctgcaaccgctccagatgcctccatgcctgccgatgatgaatcttgcaactttcattcattaattaacgaatcagatatattatttctgccaacagctgtagctgcatggtacaagtggttgggagttgtcagttgggacttgggagagtaaatcaaaatgtgccgcattcttttataacaaaaataagctgcctttgtttcaaaa

SEQ ID NO: 1046 - protein, 328 aa, Zea mays
MVHPIAEADERSPFGRLTPDEFYARHGVTHSASSFVNPRGLRIFTQRWVPSGDAPVLGAVAVVHGFTGESSWTIQLTAVHLAAAGFAVAALDHQGHGFSEGLQGHLPDINPVLDDCDAAFAPFRADYPPPLPCFLYGESLGGAIALLLHLRNRDLWRDGAVLNGAMCGVSPRFKPPWPLEHLLAAAAAVVPTWRVAFTRGNIPERSFKVDWKRALALASPRRTTAPPRAATALELLRVCRELQRRFEEVQLPLLVVHGAEDTVCDPACVEELCRRAGSKDKTLRIYPGMWHQIVGEPEENVEKVFDDIIDWLKARATATAAGAHHGEQ

SEQ ID NO: 1047 - DNA, 1492 bp, Zea mays
  CDS (190)..(1224)
gcggtctcggcgcgcgccagccgggccgcgtccatacggcacgtggtgcgcctcctccacacgtacgtactgtacgtacgcttccccgcccgtctcccccaccgcttccaggcaacatatgtaatatctgattcgagagcaggcggagttgcggattagctgctggtccgatccagaagctcctagacgatgatggacgtggagtaccacgaggagtacgtgaggaacgcgaggggcgtgcagctcttcacctgcgtctggctgccggcgccgtcctccgcgcccaccaaagcgctcgtcttcctctgccatggctacgggatggagtgcagcgacttcatgagagcatgtgggatgaagctggccacagcagggtatggcgtgtttggtatcgattatgagggccacggcaagtccatgggtgccaggtgctacatccacaagtttgagagcctcgtggccgactgcgacatgttcttcaagtccatctgtgacatggagggatacaggaacaagagccggtttctatacggcgagtccatgggcggagccgtggctctactgctgcacaggaaggatccgaccttctgggacggtgcagttcttgtggcgccaatgtgcaagatatcggagaaagtgaagccgcacccggtggtggtcaccctgctgactcaggtggaggagatcatccccaagtggaagatcgtccccaccaaggacgtcatcgactccgcattcaaggaccccgtcaagcgcgagaagatcaggaagaacacgctcatctaccaggacaagccccggctgaagacggcgctggagcttctcaggaccagcatggatgtggaagacagtctgtcagaggtgaggatgccgttcctcgtcctgcacggcgaggccgacgcggtgaccgaccccgaggtcagccgcgccctctacgagcgcgcggccagcgccgacaagaccatgaagctctacccggggatgtggcacggcctcaccgccggcgagcctgacgacaacgtggagctggtgttctccgacatcgtctcgtggctcgacaagcgcagtcgccactgggaacccgacgagcgggtgagaagggctccgccggagcctgagaacaagcgccgcgtcaccagcagcagcagtcaacggcccggcagcttcctctgcggactaggctgccgctgccggcaacaccagcaacagtgtagtaggatgtagatatggaaaacgcttgctttttcctccctaaagtttttttttggaaacgttttcctcctttaagttgttgacaaagaactgagaaaagttggatggtctcaacaaagatcttgtccatcctcagaactgtgttcctttgttctagtatagtttctgggagcaggataggcatactaaaagtgtcgggggagccccggcttgatgacctgtagccccgcatacacattccgagccggtaaaaaaaaagtgagctataccatatatattg

SEQ ID NO: 1048 - protein, 344 aa, Zea mays
MMDVEYHEEYVRNARGVQLFTCVWLPAPSSAPTKALVFLCHGYGMECSDFMRACGMKLATAGYGVFGIDYEGHGKSMGARCYIHKFESLVADCDMFFKSICDMEGYRNKSRFLYGESMGGAVALLLHRKDPTFWDGAVLVAPMCKISEKVKPHPVVVTLLTQVEEIIPKWKIVPTKDVIDSAFKDPVKREKIRKNTLIYQDKPRLKTALELLRTSMDVEDSLSEVRMPFLVLHGEADAVTDPEVSRALYERAASADKTMKLYPGMWHGLTAGEPDDNVELVFSDIVSWLDKRSRHWEPDERVRRAPPEPENKRRVTSSSSQRPGSFLCGLGCRCRQHQQQCSRM

SEQ ID NO: 1049 - DNA, 1185 bp, Zea mays
  CDS (1)..(1185)
atggccgggggcatgcaggcggcggacgcggcgggccggctgagcgcgctgctctcgctgctcgcgctgcgccggctcctcgccgtgctccagccgctggccctgctcctgctcctgcccttccggtggcgcgcgcggccggccggggccgtggccgcggccgtggcgtccgatgccgccacggcctccgcgccgggggccagcgggaggaaggggaaggcgtcgtcgtcgtcgtcggtggttctgcgggtgccggccgggtcccccatggtcgccgcgcggaggcaggcgtccgcgcgcagggagatcgccgtgcgccgggcgcgggaggccgggcgggagtacgagctcgtccccaccgctcgcggcgagacgctcttcacgcagtgctggtggccgcacccgccctccaccgttaaaccgagggcgctagttgttgtcatgcacgggctaaacgagcacagtgggaggtacgatcatttagcgaggcggttgaatgatatcggcatcaaggtgtacgggatggactggactggtcatggtggaagtgatggtctacatggatatgtgcaatctcttgaccatgctgtcaatgacttgaaaatgtacctcaagaaagtattagctgagaaccctggtcttccatgcttctgcttcggccactcgactggtggaggtatcattctgaaggctgcacttgatccagaggtagaaactctccttagaggtattgtcttgacatcaccagctgtccgtgttcagcctacacacccaatcatagcggtcatggcaccgatttttgccctcatcgcgccgaggtatcagttcacggcgtcccacaggaacggcccgccggtgtcgcgcgaccccgaggccctgcgggccaaatacacggacccgctcgtgttcacgggcgccatccgcgtgaggacgggctacgagatcctccgcctgacgtcgtacctgcagcagcacctgcaccggatcgcggtgccgctgctggtgctgcacggcgccgacgacctggtgaccgaccccaggggctcgcgggcgctgtacgagcgggcctcgtccgcggacaagtccctcaagctttacgacgggctgctgcacgacctcctgatcgagcccgagaaggacagggtgatggacgacatcgtggcgtggctgagccccagggtctga

SEQ ID NO: 1050 - protein, 394 aa, Zea mays
MAGGMQAADAAGRLSALLSLLALRRLLAVLQPLALLLLLPFRWRARPAGAVAAAVASDAATASAPGASGRKGKASSSSSVVLRVPAGSPMVAARRQASARREIAVRRAREAGREYELVPTARGETLFTQCWWPHPPSTVKPRALVVVMHGLNEHSGRYDHLARRLNDIGIKVYGMDWTGHGGSDGLHGYVQSLDHAVNDLKMYLKKVLAENPGLPCFCFGHSTGGGIILKAALDPEVETLLRGIVLTSPAVRVQPTHPIIAVMAPIFALIAPRYQFTASHRNGPPVSRDPEALRAKYTDPLVFTGAIRVRTGYEILRLTSYLQQHLHRIAVPLLVLHGADDLVTDPRGSRALYERASSADKSLKLYDGLLHDLLIEPEKDRVMDDIVAWLSPRV

SEQ ID NO: 1051 - DNA, 1005 bp, Zea mays
  CDS (1)..(1005)
atgccggcggacggggaggcgctggcgccggccgtccacttctggggcgagcacccggccacggaggcggagttctactcggcgcacggcacagagggcgagccctcctacttcaccacgcccgacgcgggcgcccggcggctcttcacgcgcgcgtggaggccccgcgcgcccgagcggcccagggcgctcgtgttcatggtccacggctacggcaacgacatcagctggacgttccagtccacggcggtcttcctcgcgcggtccgggttcgcctgcttcgcggccgacctcccgggccacggccgctcccacggcctccgcgccttcgtgcccgacctcgacgccgccgtcgctgacctcctcgccttcttccgcgccgtcagggcgagggaggagcacgcgggcctgccctgcttcctgttcggggagtccatgggcggggccatctgcctgctcatccacctccgcacacggccggaggagtgggcgggggcggtcctcgtcgctcccatgtgcaggatctccgaccggatccgcccgccgtggccgctgccggagattctcaccttcgtcgcgcgcttcgcgcccacggcggccatcgtgcccaccgccgacctcatcgagaagtccgtcaaggtgcccgccaagcgcatcgttgcagcgcgcaaccctgtgcgctacaacggccgtcccaggctcggcaccgtcgtcgagctgttgcgtgccaccgacgagctggccaagcgcctcggcgaagtcagcatcccgttccttgtcgtgcacggcagcaccgacgaggttaccgacccggaagtcagccgcgccctgtacgccgccgccgccagcaaggataagactatcaagatatacgacgggatgctccactccttgctatttggggaaccggacgagaacatcgagcgtgtccgtggggacatcctggcctggctcaacgagagatgcacagcccaggcaactcaccgtaacatacctgtcgaataa

SEQ ID NO: 1052 - protein, 334 aa, Zea mays
MPADGEALAPAVHFWGEHPATEAEFYSAHGTEGEPSYFTTPDAGARRLFTRAWRPRAPERPRALVFMVHGYGNDISWTFQSTAVFLARSGFACFAADLPGHGRSHGLRAFVPDLDAAVADLLAFFRAVRAREEHAGLPCFLFGESMGGAICLLIHLRTRPEEWAGAVLVAPMCRISDRIRPPWPLPEILTFVARFAPTAAIVPTADLIEKSVKVPAKRIVAARNPVRYNGRPRLGTVVELLRATDELAKRLGEVSIPFLVVHGSTDEVTDPEVSRALYAAAASKDKTIKIYDGMLHSLLFGEPDENIERVRGDILAWLNERCTAQATHRNIPVE

SEQ ID NO: 1053 - DNA, 1446 bp, Glycine max
  CDS (14)..(1174)
aagcgaaacgatcatggagccatctgtgactctcagattccgatcacacaccctctccctcttccctcacgcaccaatctcttccatagaccacccacacaatcatcttctcatacccatttcacccaaattcagttcaaacactacgctgtcggtggcagcaacagcgaagaaaaagccaagcatcgaaggtgtgagcgaagagttgaacgccatggcctctcagaaccttgacttcgcaccctcccggagacgggtccgtgcagctttcaccgaggtgcaccagcagctcgaccatttcttgttcaaggggtatgaaaggaattccaggggattggaaattttctgcaaaagctggatgcctgaatcgggcgtcccactcaaggctgctttgtgtttctgccatggttatggcagcacttgcactttcttctttgaaggtattgccaaaagaatagctgcttctgggtatggtgtttatgctatggactatccaggttttggtctatctgaaggtttacatggttacataccaaattttgatgatttggttgatgacgttatagaacattttacaaaaatcaaagcaaggcctgaggtgagagggttgccacgattcatattggggcagtcaatgggtggagcaattgctcttaaggttcatttgaaggaacaaaacacttgggatggagtaatccttgttgcaccaatgtgtaaaatcgcagagggcatgttgccacctactgcacttttaagggtattaaatcttttgtctaaggtgatgccaaaggcaaaactgtttccacacaaagatctatctgcgctgactttccgagaacctggcaagagaaaagtggctggttacaatgttatttcttatgatcatccaacacgattgaaaactggcatggagcttttaagtgctactcaagaaatcgagtcacaattacacaaggtttctgctccattattgattctccatggagcagcagatcaggtgacagatccattagtgagccaatttctttatgagaaagcttctagtaaagataagacactaaagatctatgaaggaagttaccacggcattttggaaggggaacctgatgacagaatttttgctgtgcacaatgacatcatctcatggcttgattttaggtgctcacttaaatgaggttcatggtattgtattgttgacctcgccaagatatttttgatcttatagtgaacaaagaacacccttcacaaaagttacctcacaggaatggcacctctattgcctcttatcatggtagttacatgtacatgtcaatttagctttctacttttattataggctcatttatgagtttaatattactattcgcttattggattttcaaaccagatgtaatccattggctccctttattgtgaggtctgaccagtaataaagtttcattatcc

SEQ ID NO: 1054 - protein, 386 aa, Glycine max
MEPSVTLRFRSHTLSLFPHAPISSIDHPHNHLLIPISPKFSSNTTLSVAATAKKKPSIEGVSEELNAMASQNLDFAPSRRRVRAAFTEVHQQLDHFLFKGYERNSRGLEIFCKSWMPESGVPLKAALCFCHGYGSTCTFFFEGIAKRIAASGYGVYAMDYPGFGLSEGLHGYIPNFDDLVDDVIEHFTKIKARPEVRGLPRFILGQSMGGAIALKVHLKEQNTWDGVILVAPMCKIAEGMLPPTALLRVLNLLSKVMPKAKLFPHKDLSALTFREPGKRKVAGYNVISYDHPTRLKTGMELLSATQEIESQLHKVSAPLLILHGAADQVTDPLVSQFLYEKASSKDKTLKIYEGSYHGILEGEPDDRIFAVHNDIISWLDFRCSLK

SEQ ID NO: 1055 - DNA, 1446 bp, Glycine max; identical to SEQ ID NO: 1053
  CDS (215)..(1174)

SEQ ID NO: 1056 - protein, 319 aa, Glycine max
MASQNLDFAPSRRRVRAAFTEVHQQLDHFLFKGYERNSRGLEIFCKSWMPESGVPLKAALCFCHGYGSTCTFFFEGIAKRIAASGYGVYAMDYPGFGLSEGLHGYIPNFDDLVDDVIEHFTKIKARPEVRGLPRFILGQSMGGAIALKVHLKEQNTWDGVILVAPMCKIAEGMLPPTALLRVLNLLSKVMPKAKLFPHKDLSALTFREPGKRKVAGYNVISYDHPTRLKTGMELLSATQEIESQLHKVSAPLLILHGAADQVTDPLVSQFLYEKASSKDKTLKIYEGSYHGILEGEPDDRIFAVHNDIISWLDFRCSLK

SEQ ID NO: 1057 - DNA, 1020 bp, Triticum aestivum
  CDS (32)..(967)
agttcacttgttcaaagggagttctgaagacatggctatggatcagtgcaccgatgatgtcaagtatgaagaggagtttatcgtgaactcccgggacaccaagctgttcacctgctcatggatgccgcacaattcagagcccaaagctttgatattcatctgccatgggattgcagcagagtgcagtgtatcaatgagagatactgcctcccgtttggtgcgcgccgggtacgccgtctacgggatagatcacgaggggcacggcaggtcgtctggccagagatgctacgtgccgaacttcagcgacgtcgttgccgactgctccagccatttcatgagcgtctgcgataagccggagaacagggggaagaagcggttcctgtacgggatctccatgggcgggagcatagcgcttctcctccacaggaaggagccggcctactgggacggcgccgttctgcttgctccaatgtgcaagatttctgatgacatgaggcctcatccggtggtggtgagcgctctgaagatggtatgcgcggtggcgcccggttggaggatcatacccatcccggacatcatcgacaaagtctgcaaagatccagagatgagaaaacaggttcgctccaatccgtatatttacaggggaaagctcccattgaagacctgtcatgaactcctcatggtgagcctagacattgagaagaacttgcacgaggtgagcctgccgttcttggtgctgcacggaggagacgacatcgtgacggatccttcggtgagcaagctgctgttcgaggaagcgtcgagcggggacaaggacttgaagctctaccctgggatgtggcacgcgctcatggcagagttccctcaggacgccgagcgcgtctactccgacatcatctcttggctggaccagagggcgaattgtgcagccaatgtttcagcgaatactggcacggcaagtgcctagaaggtgttagttaattaattatgcaatgcaaaatatgccaagtgttctgttct

SEQ ID NO: 1058 - protein, 311 aa, Triticum aestivum
MAMDQCTDDVKYEEEFIVNSRDTKLFTCSWMPHNSEPKALIFICHGIAAECSVSMRDTASRLVRAGYAVYGIDHEGHGRSSGQRCYVPNFSDVVADCSSHFMSVCDKPENRGKKRFLYGISMGGSIALLLHRKEPAYWDGAVLLAPMCKISDDMRPHPVVVSALKMVCAVAPGWRIIPIPDIIDKVCKDPEMRKQVRSNPYIYRGKLPLKTCHELLMVSLDIEKNLHEVSLPFLVLHGGDDIVTDPSVSKLLFEEASSGDKDLKLYPGMWHALMAEFPQDAERVYSDIISWLDQRANCAANVSANTGTASA

SEQ ID NO: 1059 - DNA, 1020 bp, Triticum aestivum; identical to SEQ ID NO: 1057
  CDS (38)..(967)

SEQ ID NO: 1060 - protein, 309 aa, Triticum aestivum
MDQCTDDVKYEEEFIVNSRDTKLFTCSWMPHNSEPKALIFICHGIAAECSVSMRDTASRLVRAGYAVYGIDHEGHGRSSGQRCYVPNFSDVVADCSSHFMSVCDKPENRGKKRFLYGISMGGSIALLLHRKEPAYWDGAVLLAPMCKISDDMRPHPVVVSALKMVCAVAPGWRIIPIPDIIDKVCKDPEMRKQVRSNPYIYRGKLPLKTCHELLMVSLDIEKNLHEVSLPFLVLHGGDDIVTDPSVSKLLFEEASSGDKDLKLYPGMWHALMAEFPQDAERVYSDIISWLDQRANCAANVSANTGTASA

SEQ ID NO: 1061 - DNA, 1446 bp, Zea mays subsp. mays
  CDS (220)..(1287)
  misc_feature (532)..(532): n is a, g, c or t
gcacgagaccattacctagaacatcctaatccaaaaatatcaatcatccagaaggtcaaactctcccctgtttcgacttggttccctgctcctgccctgaaaggagttgtcttggttccctgcccctgccctgaaagcagcagttggagagtcgaatcgtccttcttctctccggcgggaggaggcgggcggtgggcggtgggcggcggcaggaccgtgatgacgagcagcagcaacaacggcggccggccagacgacggcggcgaggtggtcctggaccacgagtaccaagaggagtacgtgaggaactcgcgggggatgagcctcttcgcatgcagatggctgccggcagttgcaggcaagagggggagggctccagctccaaaggcgctcgtcttcctctgccacggctacgccgtggagtgcagcgtgacgatgcgcggcaccggcgagcgcctggcgcgtgccggctacgccgtctacggcctggactacgagggccacggccgctccgacgggctgcagggctacntgccggatttcgacgcgctggtgctggactgcgacgagtacttcacctcggtggtggcggcggcggcgcagtcgcagtccaaggacgcccaccaacttccccggttcctgctcggggagtccatgggcggcgccgtggctctcctcctccaccgccggcgccccgagtactggagcggcgccgtgctggtggcgcccatgtgcaagatcgccgacgacatgcggcctcacccgctggtggtcaacatcctcagggccatgaccaccatcatcccgacgtggaagatcgtgcccagcaacgacgtcatcgacgcggcgtacaggagccaggagaagagggacgagatccgcagcaacccttactgctacaaggacaagccgcgactcaagaccgcctacgagctgctcaaagtcagcttggacctcgagcacaacctcctccaccaggtgtcgttgccgttcctgatcgtgcacggcggggcagacaaggtgacggacccgtcggtgagcgagctgctgtaccaatcggcggcgagccaggacaagacgctcaagttctatccgggcatgtggcacgccctcacctccggcgagtcgcccgacaacatccaagccgttttccaagacatcatcgcctggctcgaccacaggtcacccgacacggaacaggaggagctggtgtcgtcggaggtggagcagaaggccaagcacgacgaccagcgccaccaggagcagctccaggacggcaacaaatagctagctgcttgcttgcctgctgctttcttctctttacagaacgaaccgtttcatttggtcatgcatggatacacatcatgtctcagtgatacgtaccgactaaattaaattattagatcgaccgcgcttacctagaaattaaacaatcagctgttcgac

SEQ ID NO: 1062 - protein, 355 aa, Zea mays subsp. mays
  misc_feature (105)..(105): The Xaa at location 105 stands for Leu, Met, or Val.
MTSSSNNGGRPDDGGEVVLDHEYQEEYVRNSRGMSLFACRWLPAVAGKRGRAPAPKALVFLCHGYAVECSVTMRGTGERLARAGYAVYGLDYEGHGRSDGLQGYXPDFDALVLDCDEYFTSVVAAAAQSQSKDAHQLPRFLLGESMGGAVALLLHRRRPEYWSGAVLVAPMCKIADDMRPHPLVVNILRAMTTIIPTWKIVPSNDVIDAAYRSQEKRDEIRSNPYCYKDKPRLKTAYELLKVSLDLEHNLLHQVSLPFLIVHGGADKVTDPSVSELLYQSAASQDKTLKFYPGMWHALTSGESPDNIQAVFQDIIAWLDHRSPDTEQEELVSSEVEQKAKHDDQRHQEQLQDGNK

SEQ ID NO: 1063 - DNA, 1498 bp, Zea mays subsp. mays
  CDS (151)..(1302)
agctcccagacattgacgagacataaacccacttgcccacgcgcacggcaagccggcaaggccacgcgagaaattccatctcgagcagagcgcagcaacacgtgcgcggaggtcacagctccgatcgacaagccggccaagcagccacacatgcctcctcacatggcggcgatctcgcaccggatcgcaggatccggcccgcgcgtcgccgttgtggcgccgcctcgcccgcgggggcgcgctgccgtggtcgcgggtgctgcggcgaagggcgcacatcgggagcggacgctggagggcgcgagtgacgacctgagggccgccgcggctcagtgtctggactgggctcccgcgcggcgtcgggtgcgggccgccttcgcgcccgtgctccccaccctcgaccactgccttttcaagatggctcacaatgaaatccagatggaagagaattacgagaccaattcaaagggcgttgaaatattctggaagagttggctgccaagagagggcactgcaactaaggctgcacttttcttctgccatggatatggggatacctgcactttcttttttgaagggattgctaagaggatagcagctgctggttatgcagtttatgctatggattatcctggttttggcatgtcatatggtctccatggctatattgcaagctttgatggaatggtggaccatgtcattgaacagtatgcacgaataagaggcatgaaagaagtgtgtgagctgccacactttctcttggggcagtcaatgggaggtgcagttgccctgaaagtacacttgaagcaacaacaagaatgggatggtgtgcttcttgtcgcacctatgtgcaagatttcagaagatgtaacaccacctgcacctgtattgaaggcactgagcatattgtcatgtcttcttcctgaggcgaagttatttccgcagaaagatataggagatttggcatttagagatccaaggaaaaggaaagtagctgagtacaatgccatctcatattctgaccaaatgagattaagaacagcagttgaacttttaaaagccacgaaggacattgaatcacagttggaaaagatctcctctccattgctgattcttcacggagccgcagacatggtaaccgatcctcaggtcagcaaattcctttatgagaaagccagcacgaaggacaagaccctcaagctctatgaaggcagctaccattcaatcttagagggagaaccagatgaccggatttcaactgccattaacgacatcatttcatggctagattcacactgttaaatacccctttgtctatagcctctcatgtcctcatccattgttttggatttatagttccttattagagtaccatgggtctctagtgctttaaattttgccatggtgtgcagagataagtatctctcgaattaattagttgtgcttgctatcttgacactgttggttttatgttaattgcggacaccgcattcaatgg

SEQ ID NO: 1064 - protein, 383 aa, Zea mays subsp. mays
MPPHMAAISHRIAGSGPRVAVVAPPRPRGRAAVVAGAAAKGAHRERTLEGASDDLRAAAAQCLDWAPARRRVRAAFAPVLPTLDHCLFKMAHNEIQMEENYETNSKGVEIFWKSWLPREGTATKAALFFCHGYGDTCTFFFEGIAKRIAAAGYAVYAMDYPGFGMSYGLHGYIASFDGMVDHVIEQYARIRGMKEVCELPHFLLGQSMGGAVALKVHLKQQQEWDGVLLVAPMCKISEDVTPPAPVLKALSILSCLLPEAKLFPQKDIGDLAFRDPRKRKVAEYNAISYSDQMRLRTAVELLKATKDIESQLEKISSPLLILHGAADMVTDPQVSKFLYEKASTKDKTLKLYEGSYHSILEGEPDDRISTAINDIISWLDSHC

SEQ ID NO: 1065 - DNA, 1498 bp, Zea mays subsp. mays; identical to SEQ ID NO: 1063
  CDS (163)..(1302)

SEQ ID NO: 1066 - protein, 379 aa, Zea mays subsp. mays
MAAISHRIAGSGPRVAVVAPPRPRGRAAVVAGAAAKGAHRERTLEGASDDLRAAAAQCLDWAPARRRVRAAFAPVLPTLDHCLFKMAHNEIQMEENYETNSKGVEIFWKSWLPREGTATKAALFFCHGYGDTCTFFFEGIAKRIAAAGYAVYAMDYPGFGMSYGLHGYIASFDGMVDHVIEQYARIRGMKEVCELPHFLLGQSMGGAVALKVHLKQQQEWDGVLLVAPMCKISEDVTPPAPVLKALSILSCLLPEAKLFPQKDIGDLAFRDPRKRKVAEYNAISYSDQMRLRTAVELLKATKDIESQLEKISSPLLILHGAADMVTDPQVSKFLYEKASTKDKTLKLYEGSYHSILEGEPDDRISTAINDIISWLDSHC

SEQ ID NO: 1067 - DNA, 1137 bp, Glycine max
  CDS (1)..(1137)
atggcgagagaagcattcattttcaaggaaagcgccttgttatctctcagagcgttgaagagcttgttgatgttgatatttgcggttgctatgctgctgctgctgccattcagagggcggaggagggtgccaccggccgagaaacccagcggcaaagaggagtgccaccggaaaggcgcggtggtgcgcatgccggccaagatggtgccagggaaaagtggtgctggtgcggtggcagcaaggagggagttggccataaggagggtggtggaggatgatgatgatcaaagatgtgtgagagagtattggcttttgggaaccaaaaggggtgataccattttcacacaatgttggaaaccagtttctgataagatcaggggactcgttcttcttatgcatggactgaatgaacacagtggcaggtatagtgattttgcaaagcagctgaatgctaatggctacaaagtttatgggatggattggattggccatggtggaagtgatgggttgcatgcatatgttcattctcttgatgatgctgtctctgatatgaaagtatttcttgagaagattctaaatgaaaaccatgggcttccatgtttctgctatggacactcaacaggtgctgccattattcttaaggcactgcttgatccaaaggttgaagctagtatagttggtgctacattcacatcaccagcagttggagtggagccttctcatccaattttggtggcacttgcgcctatactttcatttttgctgccaacatatcaatgtaattctgcatacaagaaggggttgccagtttctcgagatccagaggctctaactgctaaatattcagatccattagtatgtacaggatctctaagagtacgtaccggctatgagattcttcgaattacaagctacttgcaacaaaatctcagaaaactgagagttccatttcaagttctccatggcactgctgattctattactgatcctgatgcttctcaaaaattgtatgaacaagcatcctcaacagacaaaactatcaaactgtatgaaggctttgcacatgacctcctctttgaacctgaacgagaggatatcattcaggatataattcaatggttgaatagtcgaatatga

SEQ ID NO: 1068 - protein, 378 aa, Glycine max
MAREAFIFKESALLSLRALKSLLMLIFAVAMLLLLPFRGRRRVPPAEKPSGKEECHRKGAVVRMPAKMVPGKSGAGAVAARRELAIRRVVEDDDDQRCVREYWLLGTKRGDTIFTQCWKPVSDKIRGLVLLMHGLNEHSGRYSDFAKQLNANGYKVYGMDWIGHGGSDGLHAYVHSLDDAVSDMKVFLEKILNENHGLPCFCYGHSTGAAIILKALLDPKVEASIVGATFTSPAVGVEPSHPILVALAPILSFLLPTYQCNSAYKKGLPVSRDPEALTAKYSDPLVCTGSLRVRTGYEILRITSYLQQNLRKLRVPFQVLHGTADSITDPDASQKLYEQASSTDKTIKLYEGFAHDLLFEPEREDIIQDIIQWLNSRI

SEQ ID NO: 1069 - DNA, 1137 bp, Glycine max; identical to SEQ ID NO: 1067
  CDS (1)..(1137)

SEQ ID NO: 1070 - protein, 378 aa, Glycine max; identical to SEQ ID NO: 1068

SEQ ID NO: 1071 - DNA, 981 bp, Medicago truncatula
  CDS (1)..(981)
atggcaacgcagcaggaatcagagattcccccaaatttctggggtcacacccccgaagaagaatactacacctcccaaggagttcgcaataccaaatcacacttcgaaacacccaacggcaaaatcttcacacagtcctttctcccactcaacgctgaaatcaaagctaccgtttacatgactcacggttacggctccgacaccggctggctcttccaaaaaatctgcatcacctacgccacctggggttacgccgtcttcaccgctgatctcttaggtcacggccgttccgatggcctccgttgctacctcggggacatggacaaaatcgccgccacctcactttcatttttcctccacgtccgccgttctcctccctacaaccacctcccagcgtttctcttcggtgagtcaatgggtggtttagctacattgctgatgtatttccaatcagaacccgacacgtggacgggtttaatattctcagcgccgcttttcgtaatccccgaggatatgaaaccgagtaagattcatttgtttgtgtacggtcttttgtttggtttggctgacacgtgggcagcgatgcctgataacaaaatggtcggaaaagcaattagggatccaaataagttgaagattattgcttctaatccaaggaggtatacgggcccacctagagtagggaccatgagggaacttcttagagtcactcaatatgtgcaagataatttctgcaatgtaacggtgccgtttcttacggcacatggtactgctgatggtgtcacgtgcccttcttcttctaagctgttgtatgagaaagctgaatctaaggataagactttgaagctttatgaggggatgtatcattctttgattcaaggggagcctgatgagtctgctaatcttgtgttaagggatatgagggagtggattgatgagagggttcgtaggtatggacctaataatgataattctcaatga

SEQ ID NO: 1072 - protein, 326 aa, Medicago truncatula
MATQQESEIPPNFWGHTPEEEYYTSQGVRNTKSHFETPNGKIFTQSFLPLNAEIKATVYMTHGYGSDTGWLFQKICITYATWGYAVFTADLLGHGRSDGLRCYLGDMDKIAATSLSFFLHVRRSPPYNHLPAFLFGESMGGLATLLMYFQSEPDTWTGLIFSAPLFVIPEDMKPSKIHLFVYGLLFGLADTWAAMPDNKMVGKAIRDPNKLKIIASNPRRYTGPPRVGTMRELLRVTQYVQDNFCNVTVPFLTAHGTADGVTCPSSSKLLYEKAESKDKTLKLYEGMYHSLIQGEPDESANLVLRDMREWIDERVRRYGPNNDNSQ

SEQ ID NO: 1073 - DNA, 1188 bp, Medicago truncatula
  CDS (1)..(1188)
atggagctatcaaagacattcagattccaatcaaagaacctcacatccttcatacctttctctcccatatacaacaaccctttgaagaatcatctatcctttagaacaaaactcaacaatagacccaagaaaatcaagttaacagtgacagcaaagagaaaagcaccaattgatggtgtaagtgaagagttgaatgatatagcttcttataaccttgattttgcatattctagaagaagggttcgttctgcttttgctgaggttcaacaacagcttgatcattgcttgtttaaggatgctcctgctggaatcagagcagaagaatggtatgaaaggaattcgaggggattggaaattttctgcaagagctggatgccagagtcaggaattccaatcaaggcatctgtgtgtttttgtcatggatatggtgatacttgcacattcttctttgaaggtgttgcgaggagaattgctgcatctgggtatgctgtttttgcgatggactatccaggttttggactttcagaaggattgcatggttacataccaaacttcgatgatcttgtcgacgatgttatagagcattatacacaaataaaagcaagacctgatttgagagaattacctcgagttctgttggggcagtcaatgggtggggcggtttctcttaaagtttatttgaaggagccaaataattgggatgctgtaatgcttgtcgcaccaatgtgtaaaattgcagatgatgtgttaccacccgatgcagtaatgaaggtgttaactcttttgtcaaaagtgatgccaaaagcaaagctcttcccaaacaaagaccttgctgaactggctttcagagaaccgagtaaaagaaaattggctccttacaacgttatttgttatgaggataatccacgacttaaaaccggtatggaacttctacgggtgacaaaagaaattgagtcaaaagtagagaaggtatcagcaccattattgattcttcatggagcagcagacaaggtgacagatccattagtgagcaaatttctgtatgaaaatgcatctagcaaggataagactttaaagctctatgaaaatggttaccactgcattttggaaggggagcctgatgatagaataaaggctgtacatgatgacattgtctcatggcttgattctaggtgttcagttaagtga

SEQ ID NO: 1074 - protein, 395 aa, Medicago truncatula
MELSKTFRFQSKNLTSFIPFSPIYNNPLKNHLSFRTKLNNRPKKIKLTVTAKRKAPIDGVSEELNDIASYNLDFAYSRRRVRSAFAEVQQQLDHCLFKDAPAGIRAEEWYERNSRGLEIFCKSWMPESGIPIKASVCFCHGYGDTCTFFFEGVARRIAASGYAVFAMDYPGFGLSEGLHGYIPNFDDLVDDVIEHYTQIKARPDLRELPRVLLGQSMGGAVSLKVYLKEPNNWDAVMLVAPMCKIADDVLPPDAVMKVLTLLSKVMPKAKLFPNKDLAELAFREPSKRKLAPYNVICYEDNPRLKTGMELLRVTKEIESKVEKVSAPLLILHGAADKVTDPLVSKFLYENASSKDKTLKLYENGYHCILEGEPDDRIKAVHDDIVSWLDSRCSVK

SEQ ID NO: 1075 - DNA, 1035 bp, Medicago truncatula
  CDS (1)..(1035)
atgaagaggttaccaggtgttgataatgaattgcagaagaaattggatgcaaaaatggatgaagttcctgctagaagacaagctcgtgaggcttttaaggatattcagcttggtattgaccatatattatttaagactccatgtgatggattagagatgaaagagtcttatgaggtgaactcaaaagggattgagatcttttggaaaagttggcttcctaaggaatctaagccaaaagcagcagtatttttctgtcatggatatggagacacttgcacttttttctttgaaggcataaaacttgcatcatgtggatatggagtttttgctatggattatccaggatttggtctttcagaaggtcttcatggctatattactagttttgatcagcttgttgacgatgtcattgagcagtactccaaaatcaaagaaaatccggagttcaagtctcttccatgctttcttttcggcgaatctatgggcggagctgttgcgttgaagacacacttcaaacaacctaaagcatggaatggtgcaattctttgtgcaccaatgtgtaaaatttcagagaaaatggttccaccaaagttggttgtaaaaatgctaattgctatgtccaatgttcttccaaagaataagatggtcccgacaaatgatataggagatgcagcattcaaagatccaaagaagagggaacagacacactataatgttattagttacaaggataaaccgcgcctgcggactgctgtagaactgcttaaaactactgaagaaatcgaacaaaaattggaagaagtgactctaccattattcattcttcatggagaagctgacacagtgactgatccatcagtgagcaaagcattgtatgaaaaagcaagctcttcagacaagaaacttgagctttacaaagatgctcaacatgccctaattgagggtgagtctgatgaaacaattactcaaattcttggtgacatcatttcttggcttgatgaacatagcttgaaacataatattgaaacttcctag

SEQ ID NO: 1076 - protein, 344 aa, Medicago truncatula
MKRLPGVDNELQKKLDAKMDEVPARRQAREAFKDIQLGIDHILFKTPCDGLEMKESYEVNSKGIEIFWKSWLPKESKPKAAVFFCHGYGDTCTFFFEGIKLASCGYGVFAMDYPGFGLSEGLHGYITSFDQLVDDVIEQYSKIKENPEFKSLPCFLFGESMGGAVALKTHFKQPKAWNGAILCAPMCKISEKMVPPKLVVKMLIAMSNVLPKNKMVPTNDIGDAAFKDPKKREQTHYNVISYKDKPRLRTAVELLKTTEEIEQKLEEVTLPLFILHGEADTVTDPSVSKALYEKASSSDKKLELYKDAQHALIEGESDETITQILGDIISWLDEHSLKHNIETS

SEQ ID NO: 1077 - DNA, 1041 bp, Medicago truncatula
  CDS (1)..(1041)
atgaagaggttaccaggtgttgataatgaattgcagaagaaattggatgcaaaaatggatgaagttcctgctagaagacaagctcgtgaggcttttaaggatattcagcttggtattgaccatatattatttaagactccatgtgatggattagagatgaaagagtcttatgaggtgaactcaaaagggattgagatcttttggaaaagttggcttcctaaggaatctaagccaaaagcagcagtatttttctgtcatggatatggagacacttgcacttttttctttgaaggaatagctagaaaacttgcatcatgtggatatggagtttttgctatggattatccaggatttggtctttcagaaggtcttcatggctatattactagttttgatcagcttgttgacgatgtcattgagcagtactccaaaatcaaagaaaatccggagttcaagtctcttccatgctttcttttcggcgaatctatgggcggagctgttgcgttgaagacacacttcaaacaacctaaagcatggaatggtgcaattctttgtgcaccaatgtgtaaaatttcagagaaaatggttccaccaaagttggttgtaaaaatgctaattgctatgtccaatgttcttccaaagaataagatggtcccgacaaatgatataggagatgcagcattcaaagatccaaagaagagggaacagacacactataatgttattagttacaaggataaaccgcgcctgcggactgctgtagaactgcttaaaactactgaagaaatcgaacaaaaattggaagaagtgactctaccattattcattcttcatggagaagctgacacagtgactgatccatcagtgagcaaagcattgtatgaaaaagcaagctcttcagacaagaaacttgagctttacaaagatgctcaacatgccctaattgagggtgagtctgatgaaacaattactcaaattcttggtgacatcatttcttggcttgatgaacatagcttgaaacataatattgaaacttcctag

SEQ ID NO: 1078 - protein, 346 aa, Medicago truncatula
MKRLPGVDNELQKKLDAKMDEVPARRQAREAFKDIQLGIDHILFKTPCDGLEMKESYEVNSKGIEIFWKSWLPKESKPKAAVFFCHGYGDTCTFFFEGIARKLASCGYGVFAMDYPGFGLSEGLHGYITSFDQLVDDVIEQYSKIKENPEFKSLPCFLFGESMGGAVALKTHFKQPKAWNGAILCAPMCKISEKMVPPKLVVKMLIAMSNVLPKNKMVPTNDIGDAAFKDPKKREQTHYNVISYKDKPRLRTAVELLKTTEEIEQKLEEVTLPLFILHGEADTVTDPSVSKALYEKASSSDKKLELYKDAQHALIEGESDETITQILGDIISWLDEHSLKHNIETS

SEQ ID NO: 1079 - DNA, 975 bp, Medicago truncatula
  CDS (1)..(975)
atggatttgagatatgaataccaagaaggatattggaagaactcaaggggaatgcgactcttcacatgcaagtggttgcctatttcttcttctcccaaggctcttgttttcctatgccatggatatggaatggaatgcagtggattcatgaaagaaattggagaaaagctagcgtctgcaggatacgctgtgttcggaatggactacgagggacatggacactctgctggtgttcgttgttacataaccaaatttgacaacgttgttaacgactgttccaacttttacaagtcaatttgcgaactccaagaatacaggggaaaggccaaattcttatatggagaatcaatggggggagctgtggccgtattattgcataaaaaagacccttcattttgggatggtgctgttttcgtggcaccaatgtgtaagatatcagagaaggtgaagccacatcgtgttgctgttagcatgttgtcgggattggaacatatttttcccaagtggaaaatagttccgacaaaggatgtcatcgattcagccttcaaagatcacaccaaacgggaaatgataaggaaaaacaagttgatatatcaggacaagccaaggttaaaaacagcattggaactgctgagaactagtttgagtgttgaaaccaacttacaccaggtgacgttgcctttcttagtgttacatggagaggaagataaagtgacagacccggaagtaagcaaggcattatatgagagagctagtagtgtagacaagaccataaaattgtaccctggaatgtggcatggcttaacagctggggagcctgatgaaaatatcgaacttgttttcggagacattataagttggctggataagcgagctattggcaaggaacgtattgagtcatttctaccaattccaacttacaagaaaattaatcttgacgagtttcaaggaggccgcgctcgcgcgtcactttag

SEQ ID NO: 1080 - protein, 324 aa, Medicago truncatula
MDLRYEYQEGYWKNSRGMRLFTCKWLPISSSPKALVFLCHGYGMECSGFMKEIGEKLASAGYAVFGMDYEGHGHSAGVRCYITKFDNVVNDCSNFYKSICELQEYRGKAKFLYGESMGGAVAVLLHKKDPSFWDGAVFVAPMCKISEKVKPHRVAVSMLSGLEHIFPKWKIVPTKDVIDSAFKDHTKREMIRKNKLIYQDKPRLKTALELLRTSLSVETNLHQVTLPFLVLHGEEDKVTDPEVSKALYERASSVDKTIKLYPGMWHGLTAGEPDENIELVFGDIISWLDKRAIGKERIESFLPIPTYKKINLDEFQGGRARASL

SEQ ID NO: 1081 - DNA, 1149 bp, Arabidopsis thaliana
  CDS (1)..(1149)
atgatctgttcaagtaaaggaacggtcgtaattgctactagaagctcatttcccagattactaaaccggattcaaaatcgaaatgatgttccgattagtgtcatagctactcgacgatcatcaatgtcggtggaggcgtttccgatgaggttaaaatcatcacagaagaagaggaagatgaacattggttgcggtgtttccccttcttcgccgacgacgacggtggtagatgaggaagtagccattaggcggaaattggcaatgagacgggttttggaggataacggtggcgatggaagctccgtcagagatttctcgctattcacgaccaagagaggtgacacgttgttcactcagtcatggactcctgttgactccgctaagaacaggggacttgttgttctgcttcatggtctgaacgaacacagtggcaggtatagtgattttgcaaagcagctaaatgtaaatggattcaaggtctatggaatagattggatcggtcatggtggaagcgatggacttcatgcttacgttccttctcttgattatgctgtcgctgatttgaaatcgtttattgagaaggtaattgcggaaaacccgggattgccctgtttctgcattggccactcaacaggaggagccatcatcttaaaggctatgctagatgcaaagattgaagctcgagtttcagggattgtgctaacttcacccgcagttggagtccaaccaacttatcctatcttcggcgtaattgcaccattcctctcgttcctcataccgagatatcagttaagtgctgcgaaaaagaaaataatgccggtttctcgtgacccggaagctctattggctaaatactctgacccgctagtctacactggatttatccgagcaagaaccggtaacgagatccttagacttggtgctcatttactgcagaatctgaacagaatcaaggttccgtttcttgtgatgcacggcacagctgatacagttactgatcctaaaggtactcagaagctatacaatgaggcttcctcatccgataagtcgatcaagctgtacgacgggttgttacacgatctgctctttgaaccagaacgggaaactatagctggagtcatattggattggctaaaccggcgggtttaa

SEQ ID NO: 1082 - protein, 382 aa, Arabidopsis thaliana
MICSSKGTVVIATRSSFPRLLNRIQNRNDVPISVIATRRSSMSVEAFPMRLKSSQKKRKMNIGCGVSPSSPTTTVVDEEVAIRRKLAMRRVLEDNGGDGSSVRDFSLFTTKRGDTLFTQSWTPVDSAKNRGLVVLLHGLNEHSGRYSDFAKQLNVNGFKVYGIDWIGHGGSDGLHAYVPSLDYAVADLKSFIEKVIAENPGLPCFCIGHSTGGAIILKAMLDAKIEARVSGIVLTSPAVGVQPTYPIFGVIAPFLSFLIPRYQLSAAKKKIMPVSRDPEALLAKYSDPLVYTGFIRARTGNEILRLGAHLLQNLNRIKVPFLVMHGTADTVTDPKGTQKLYNEASSSDKSIKLYDGLLHDLLFEPERETIAGVILDWLNRRV

SEQ ID NO: 1083 - DNA, 999 bp, Arabidopsis thaliana
  CDS (1)..(999)
atgccgtcggaagcggagagctcagcgaattcagctccggcaactccgccaccaccaccgaatttctggggaaccatgccggaggaagagtactacacttcacaaggagtacgtaacagcaaatcatacttcgaaacaccaaacggcaagctcttcactcagagcttcttaccattagatggtgaaatcaaaggcactgtgtacatgtctcatggatacggatccgatacaagctggatgtttcagaagatctgtatgagtttctctagttggggttacgctgttttcgccgccgatcttctcggtcacggccgttccgatggtatccgctgctacatgggtgatatggagaaagttgcagcaacatcattggctttcttcaagcatgttcgttgtagtgatccatataaggatcttccggcttttctgtttggtgaatcgatgggaggtcttgtgacgcttttgatgtattttcaatcggaacctgagacttggaccggtttgatgttttcggctcctctctttgttatccctgaggatatgaaaccaagcaaggctcatctttttgcttatggtctcctctttggtttggctgatacgtgggctgcaatgccggataataagatggttgggaaggctatcaaggaccctgaaaagcttaagatcatcgcttctaacccgcaaagatatacagggaagcctagagtgggaacaatgagagagttactgaggaagactcaatacgttcaggagaatttcgggaaagttactattccggtgtttacggcgcacgggacagcggatggagtaacatgtcctacatcttcgaagctactatacgaaaaagcgtcaagcgctgataaaacgttgaagatctatgaagggatgtatcactcgctgattcaaggagagcctgacgagaacgctgagatagtcttgaaggatatgagagagtggatcgatgagaaggttaagaagtatggatctaaaaccgcttga

SEQ ID NO: 1084 - protein, 332 aa, Arabidopsis thaliana
MPSEAESSANSAPATPPPPPNFWGTMPEEEYYTSQGVRNSKSYFETPNGKLFTQSFLPLDGEIKGTVYMSHGYGSDTSWMFQKICMSFSSWGYAVFAADLLGHGRSDGIRCYMGDMEKVAATSLAFFKHVRCSDPYKDLPAFLFGESMGGLVTLLMYFQSEPETWTGLMFSAPLFVIPEDMKPSKAHLFAYGLLFGLADTWAAMPDNKMVGKAIKDPEKLKIIASNPQRYTGKPRVGTMRELLRKTQYVQENFGKVTIPVFTAHGTADGVTCPTSSKLLYEKASSADKTLKIYEGMYHSLIQGEPDENAEIVLKDMREWIDEKVKKYGSKTA

SEQ ID NO: 1085 - DNA, 1173 bp, Arabidopsis thaliana
  CDS (1)..(1173)
atggcgtcaacgtcggcggaaatggaccaattaacatcaggcgcgagcaatcggataatatttatcttgagaacgcttaggaagtgtctcgtcttcgttctctctctcgtcctttctcttctccttattcttcgtctccgtcctcgtcgccgtgtctctcctctttcatcgcctgaggatgaggctgttccggctccttcgaggcgatggagacggaagatggcgtggaagctggaggaggaagatacggctagacgtcgttccttagcggaaggcgttgagatggccggagatggagagatctcttgttcgttgttttacggacgtcgtggtaacgctttattctctcggtcgtggttgcctatttccggcgaacttagggggattttgattattatccatggattgaatgaacacagtggaagatattctcaattcgctaagcagctaaacgcgagtaatttaggtgtatacgcaatggactggattggtcacggtgggagtgatggtttgcatggttatgttccttctcttgattatgttgtttccgacactgaagctttcttggaaaagattaggtctgagaatccgggggttccgtgtttcctctttggtcactctaccggtggagctgtggttttgaaggcagcttcatctccctctattgaagatatgttagccggtattgtcctaacatcgcctgcactccgtgtcaaacccgctcatcccattgtcggggcaatagctccaatcttctcattgctcgcaccaaggttccaattcaaaggagcaaacaagagaggcattccggtctcaagagaccctgaagctctcttagccaagtactctgatccgttagtctacactggtccgattagagtccgaacagggtatgagattcttcgcataacggcttacttgacccggaacttcaaatctgttacagtgcctttctttgttctccatggtacagaggacaaagtcactgatccactagcttcccaagacttgtataatcaggcaccatcagttttcaaagacatcaaactctatgacggtttcttacacgaccttctctttgaacctgagcgtgaggaagtcggtcgtgatatcatagattggatgatgaatcggcttgacgatgttaacggatcagcagctagcctctggtaa

SEQ ID NO: 1086 - protein, 390 aa, Arabidopsis thaliana
MASTSAEMDQLTSGASNRIIFILRTLRKCLVFVLSLVLSLLLILRLRPRRRVSPLSSPEDEAVPAPSRRWRRKMAWKLEEEDTARRRSLAEGVEMAGDGEISCSLFYGRRGNALFSRSWLPISGELRGILIIIHGLNEHSGRYSQFAKQLNASNLGVYAMDWIGHGGSDGLHGYVPSLDYVVSDTEAFLEKIRSENPGVPCFLFGHSTGGAVVLKAASSPSIEDMLAGIVLTSPALRVKPAHPIVGAIAPIFSLLAPRFQFKGANKRGIPVSRDPEALLAKYSDPLVYTGPIRVRTGYEILRITAYLTRNFKSVTVPFFVLHGTEDKVTDPLASQDLYNQAPSVFKDIKLYDGFLHDLLFEPEREEVGRDIIDWMMNRLDDVNGSAASLW

SEQ ID NO: 1087 - DNA, 1392 bp, Arabidopsis thaliana
  CDS (1)..(1392)
atgatctgttcaagtaaaggaacaatcttaatcgctagaggtaaaaattcaaatacaatccctagattacccctaaaagggtcatccacaaattacgcgaatcgaattcaaattcgaaacccaatcagtgtcaaaactttccggcgatcatcttcatcgtcaatggcggtggaaacaatgtcgatgggatcagattcatcaactttgattctaacatcaggagcaagcggtcgcgttagggtactcttctcgatgcgagagcttaagcgtctcgttacgattatccaatcgttgattcttttcctcctccttccgtttcgcgtcgtcgtttggcggcggaggactggtgcggtggttatcagagacgataagcaagagaggaaggtttggtctcctccgcagatcgtggtgaggaagaggaacatcggtggcgaaagcagcgtttctcctccgtcggttccagctgcggtggtggatggggaggttgctgttcgacgtgaactggcgattaagcgagttttggaggatgaaggcggcgatggaagctccgtcagagattattcgctattcacgacgaagagaggagatacgttgtttagtcagtcatggtcacctctttccccaaatcacaggggacttattgttctgctacatggattaaacgagcatagtggcaggtatagtgattttgcaaagcagcttaatgctaatgggttcaaggtctatggaattgactggatcggtcatggcggaagtgatggacttcatgcttacgttccttcccttgattacgctgtcacagatttgaaatcatttcttgaaaaggtattcacagagaatccaggactcccctgtttctgctttggacactcaacaggtggagcaatcatcctcaaggctatgctggatccaaagattgaatctcgagtttcaggcattgcattgacttcaccagctgttggagtccaaccatcccatccaatcttcgctgttcttgctccaatcatggcgtttctactacccaggtaccaaatcagtgcagcaaacaagaaaggaatgccggtttctcgtgacccagcagctctcatcgccaaatactctgacccattagtcttcaccggatccatccgggttaaaaccggctacgagatccttagaatcactgctcacttgcaacagaacctgaacaaagtgaaagttccctttcttgtgatgcacggtactgacgacacagttaccgatcctagcgcctcaaagaagctctacgaggaagctgcctcgtcagacaaatcactcaagctctacgacgggttgttgcacgatcttctttttgaacccgaacgagaaatcatcgctggagccatattagattggctaaaccagcgggtttag

SEQ ID NO: 1088 - protein, 463 aa, Arabidopsis thaliana
MICSSKGTILIARGKNSNTIPRLPLKGSSTNYANRIQIRNPISVKTFRRSSSSSMAVETMSMGSDSSTLILTSGASGRVRVLFSMRELKRLVTIIQSLILFLLLPFRVVVWRRRTGAVVIRDDKQERKVWSPPQIVVRKRNIGGESSVSPPSVPAAVVDGEVAVRRELAIKRVLEDEGGDGSSVRDYSLFTTKRGDTLFSQSWSPLSPNHRGLIVLLHGLNEHSGRYSDFAKQLNANGFKVYGIDWIGHGGSDGLHAYVPSLDYAVTDLKSFLEKVFTENPGLPCFCFGHSTGGAIILKAMLDPKIESRVSGIALTSPAVGVQPSHPIFAVLAPIMAFLLPRYQISAANKKGMPVSRDPAALIAKYSDPLVFTGSIRVKTGYEILRITAHLQQNLNKVKVPFLVMHGTDDTVTDPSASKKLYEEAASSDKSLKLYDGLLHDLLFEPEREIIAGAILDWLNQRV

SEQ ID NO: 1089 - DNA, 1137 bp, Schizosaccharomyces pombe 972h-
  CDS (1)..(1137)
atggctgatttatatacaaaagattggactgatgttaaagacaagcccgttgcacgtgttgtttttatccatggatttggcgaacatgtcaatgcttatccagagttttttgaagcattgaacgagcgtaatattgaagtttatacctttgatcagagaggttttggtcattcaagaaagggaggtccaaagaagcagggttgtactggtggttggtctctagtatttcctgacctggattatcaaattcttcgtgctagcgatacggagcttcccctatttttatggggacattctatgggtggaggattggctttacgttatggtatcagtgggacacatcgtcacaagctggctggtgtaatcgcacaagctcctatgcttcgttgtcatcctgacactgaaccaaactttttgttacgaaaagcacttactttggtttccaaggtacatcctaattttcttttcgatagcgatgtccaaagtcaacacataaccagggatgaagccgtcaatcaacgtttgcaggatgatcctcttgtttcatcggtaggttcgttgcaagtctttagtgacatgctaaacagaggtacgaaaactattgaattagctcctcagtttttccttcctctccttataacccatggtactgatgataatgtgacttgttccgattcttcaaaagaattttatgaaaatgcgggcactaaagataagacatatcaatcgtatccaggattttaccattctttgcatattgagaagaaaccagaggtttatgagtaccttgacaaagttgctgcttggatttacgaacactcaaagcctagtgaaactgtaaagtcggaacaggaaaccgctgttgaacatcctaagcctaccgctactacatctgctccttctgcttctcctactggagttcctgttgaagaggagtcacataaagccacgtcggatgctgttcctcctgctgaagcaaagcctgagcctgtaccagcatcagctgcagaaagggcgcctacttctgaaagtaccactgttcctgagaccatagtggcatcaacaaccaaggtaatttcagaaccagctcctagagttactactgcggccaccgccgatattgtaaccaataaataa

SEQ ID NO: 1090 - protein, 378 aa, Schizosaccharomyces pombe 972h-
MADLYTKDWTDVKDKPVARVVFIHGFGEHVNAYPEFFEALNERNIEVYTFDQRGFGHSRKGGPKKQGCTGGWSLVFPDLDYQILRASDTELPLFLWGHSMGGGLALRYGISGTHRHKLAGVIAQAPMLRCHPDTEPNFLLRKALTLVSKVHPNFLFDSDVQSQHITRDEAVNQRLQDDPLVSSVGSLQVFSDMLNRGTKTIELAPQFFLPLLITHGTDDNVTCSDSSKEFYENAGTKDKTYQSYPGFYHSLHIEKKPEVYEYLDKVAAWIYEHSKPSETVKSEQETAVEHPKPTATTSAPSASPTGVPVEEESHKATSDAVPPAEAKPEPVPASAAERAPTSESTTVPETIVASTTKVISEPAPRVTTAATADIVTNK

SEQ ID NO: 1091 - DNA, 954 bp, Arabidopsis thaliana
  CDS (1)..(954)
atggcgattgaaacagaggacatcaagtacgaagagagtttcataaagaacactcgaggatttaagttgttcacatgcagatggctaccaacaaacagagagccaagggctttagttttcctttgccatggatatggcatggaatgcagtatcaccatgaatagtactgctagaaggcttgtgaaggcaggatttgcggtatatggaatggattatgaaggacatggaaaatctgatgggcttagcgcttatatctcaaactttgatcgtcttgttgatgatgtctcaactcactacacagctatttgcgagagggaagaaaacaagtggaagatgaggtttatgttaggagagtcaatgggaggagcagttgttttgttgctaggcaggaagaaccctgacttttgggatggagctatcttggtcgctccaatgtgtaagatcgcagaagaaatgaagccaagtccttttgttatttcgatattaacaaagcttatttcgattatacccaaatggaaaatcattcctagtcaagatatcatcgagatttcatataaagagccagaaattagaaaacaggttagagaaaatcctttatgctcgaaaggacgaccacgcttgaaaactgcgtatgagctcttaaggatcagcaacgacttggagaagagacttcaagaggtttcattgccgtttttggtattacacggagatgatgataaagtaacagataaagcagtgagccaagaactgtacaaggttgcgttgagcgctgacaagaccttaaagttgtaccctgggatgtggcacggtttgctcaccggcgagacaccagagaacatcgaaattgtctttgccgacgtcatcagttggttggaaaaaagaagtgattatggaaatgataggtttgagtcagagcttaaacagcgtaatgatcgtttaaatttcaagaaatag

SEQ ID NO: 1092 - protein, 317 aa, Arabidopsis thaliana
MAIETEDIKYEESFIKNTRGFKLFTCRWLPTNREPRALVFLCHGYGMECSITMNSTARRLVKAGFAVYGMDYEGHGKSDGLSAYISNFDRLVDDVSTHYTAICEREENKWKMRFMLGESMGGAVVLLLGRKNPDFWDGAILVAPMCKIAEEMKPSPFVISILTKLISIIPKWKIIPSQDIIEISYKEPEIRKQVRENPLCSKGRPRLKTAYELLRISNDLEKRLQEVSLPFLVLHGDDDKVTDKAVSQELYKVALSADKTLKLYPGMWHGLLTGETPENIEIVFADVISWLEKRSDYGNDRFESELKQRNDRLNFKK

SEQ ID NO: 1093 - DNA, 942 bp, Candida glabrata CBS 138
  CDS (1)..(942)
atggctgaatatccatacaagttaaggacgaaagagccggagttgaaatacgaggagtttaacggtgctaagtttgcgtatgtgttgtggccatcggagggagcaccgaaggctagagtgttattggtgcatgggtttggcgagtacacaaagatcaaccaccggctgatggaccaccttgcattggcaggttacgagtcatttacgtttgaccagagaggtgccggcttgacctccccgggcaaacagaagggtatcaccaacgagtaccacactttcaatgacctggaccactttgtcgcgaagaacctgctggagtgcaaagagaaggacattccgctgtttctgtggggccactccatgggcggcggcatcatcctcaactacgccagcaagggcaagcacagagaccaagtgagcgggtacattgcgtcgggcccgctcatcatcctgcacccacactcctcgcccaataagatcacccagtggctgtcgccggtgctggccaagtgtctgacaaagacgaggatcgacacgggcctggacctcgagggcatcacctcggacccgcgctaccgcaagttcctggagaacgacaagcccatgagtgtgccgctgtatggcagcttcggccagatctacgacttcctggagagaggcaagcggctatacaacgatcaggacgggttcgtctcgcgcaagtacccaagggacaagccgctgttcatacagcacggcaaggacgacaccatcaacgacccacagggctcgcagaagtactacgacatgtgccctgcgcaggataagacgctcaggatctacgaccatgctcgccacagcatcctgtccctagagaaggacgaactgttcgctccgatcttcaacgacctgcaagcctggctggacgaacactcgcaggctcgcatcaagagcaaattgtga

SEQ ID NO: 1094 - protein, 313 aa, Candida glabrata CBS 138
MAEYPYKLRTKEPELKYEEFNGAKFAYVLWPSEGAPKARVLLVHGFGEYTKINHRLMDHLALAGYESFTFDQRGAGLTSPGKQKGITNEYHTFNDLDHFVAKNLLECKEKDIPLFLWGHSMGGGIILNYASKGKHRDQVSGYIASGPLIILHPHSSPNKITQWLSPVLAKCLTKTRIDTGLDLEGITSDPRYRKFLENDKPMSVPLYGSFGQIYDFLERGKRLYNDQDGFVSRKYPRDKPLFIQHGKDDTINDPQGSQKYYDMCPAQDKTLRIYDHARHSILSLEKDELFAPIFNDLQAWLDEHSQARIKSKL

SEQ ID NO: 1095 - DNA, 966 bp, Kluyveromyces lactis NRRL Y-1140
  CDS (1)..(966)
atgtcttttccatacgaaagcgaggtcaaaacagaaattccaacacttcagaaagaagaattcaacgatgcaaccttcacctacatgaaatggccttccagccttaagaagcacgagcgtaacactcacactaacaccactgatgtagaagacgaacaagttattacaaagtgcagagttttgattgtacatggattctgtgaatactacaagatttattacaaacttatggataatttagctttgaatggtgttgaaagttttatgttcgatcaaagaggatctggtgatacctccccaggaaaggagagggggaaaaccgatgaagttgccacttttgctgatttaaaccatttcatcgagatgaacttgaaagagtgtgaacccgtagatcgcaaattgttcctttttggccattccatgggtggcggaatcgcattgaactacgggtgtaatggtaagtacaaggataaaatcgcaggaatcattacgacaggccctttgattgaattgcatcctaactcaagacccaatttcattctgcgttgcctggcacctgcactagcaagcgtgttgccgaggttcacgatcgatacagcattgaatgtggacgggattacaagcgatgaagattacaaggagttgttaagaacagaccctaagctaaagttaacgggttctttcaaacaaatctacgatatgctagaaagaggcaagaagttggtgaatgacccatatgttgcaaagacatttaaaagcccactattgataatgcatgggaaggccgacactatcaacgacccggattcatccgaaaagttcgtcaatgaaaggatacctcaggtcgaggacaagactgtaaagatttataacgatgcaaaacattcattattatcaatagaagtggattccgttttccaagaatcgtttaaagacatgatcgactggatcaacgcacatgtataa

SEQ ID NO: 1096 - protein, 321 aa, Kluyveromyces lactis NRRL Y-1140
MSFPYESEVKTEIPTLQKEEFNDATFTYMKWPSSLKKHERNTHTNTTDVEDEQVITKCRVLIVHGFCEYYKIYYKLMDNLALNGVESFMFDQRGSGDTSPGKERGKTDEVATFADLNHFIEMNLKECEPVDRKLFLFGHSMGGGIALNYGCNGKYKDKIAGIITTGPLIELHPNSRPNFILRCLAPALASVLPRFTIDTALNVDGITSDEDYKELLRTDPKLKLTGSFKQIYDMLERGKKLVNDPYVAKTFKSPLLIMHGKADTINDPDSSEKFVNERIPQVEDKTVKIYNDAKHSLLSIEVDSVFQESFKDMIDWINAHV

SEQ ID NO: 1097 - DNA, 903 bp, Debaryomyces hansenii CBS767
  CDS (1)..(903)
atggcaattgaaatcccttataagacggaaaatgaaccagaagttggttttattgaatttgataaggctaactttaaaacagttacttggaaagcaccggaatcagttccatataaaggcagaatagtctatgtccacggatttagtgaacatgctactatttatactgaatactttgataaattgtctcaaaaaggatacgatatttttttcttcgatcagagaggagctggcgaaacatctccgggtgatcaggttggtaaaacagatgaagcacatacattcaatgatttggactttatgatcaaacataacctcgaattcaaaaaagacccatcagaaaagttcttcttaatggggcacctgatgggcggtgctattgtgttgaattatgctatcaaaggtaaatatagagaacacatcaagggtgtggtttcctgtgcaccattagtattgttgcaccctaaaacccaaccaaattttgttgtgagagcactctcaccattaattaataaattggtgcctaatttaaagatagactctaaattaaactacgactacattacttcgaatgagggctggaagaactatatcatgcaccacgatactaaattaattggaactgcaagacaattttttgacatgtttgcccgtggtgaagcgctaactaagcctgaatttgtgtgtaagttcaatccggaaacctctctacttgtaattcacggtacgaatgataacatcaattggatcgaaggtaccaagaagttctacaacttggtagatgataagatcgacaaatccttctttaaaattaaagacggtagacactccctatttattgaaaatgaaattatttttaaagatgtttttgataaagttttgaccttcttgaacaatcattag

SEQ ID NO: 1098 - protein, 300 aa, Debaryomyces hansenii CBS767
MAIEIPYKTENEPEVGFIEFDKANFKTVTWKAPESVPYKGRIVYVHGFSEHATIYTEYFDKLSQKGYDIFFFDQRGAGETSPGDQVGKTDEAHTFNDLDFMIKHNLEFKKDPSEKFFLMGHLMGGAIVLNYAIKGKYREHIKGVVSCAPLVLLHPKTQPNFVVRALSPLINKLVPNLKIDSKLNYDYITSNEGWKNYIMHHDTKLIGTARQFFDMFARGEALTKPEFVCKFNPETSLLVIHGTNDNINWIEGTKKFYNLVDDKIDKSFFKIKDGRHSLFIENEIIFKDVFDKVLTFLNNH

SEQ ID NO: 1099 - DNA, 933 bp, Yarrowia lipolytica CLIB122
  CDS (1)..(933)
atgtcgactgaagctaccgaaacccatcccttccccgttaagcacggaaaggtgtcgtactacacggccaaggacgggcaaaaactgcgagtgggcgagtggggcaccgagctggcccagcccaagggcaagctggttttcaaccacggattcaccgaacatattggagtgttcgacgagctgttcaagcgaatggtggacaacggctactacgtgcttgcgctggatcagcgaggagccggagaacagtgccagggcaagaagtacggcatcaccaacgagacgtttgtgtacgaggatctcaacggggtgatcaaggagtatctggtgaagaacaacagcattgaacagagcaaaaaagagaagctgttcatctggggccactcaatgggcggcggcattgctctcaactacggagtcaagggtctttaccgagaccatttcaccggctttattggttgcgctcctctggtccagcttcacccggcctctgtgcccaacttcattttgcgaggcgccatggaggtgcttgcccgagcctggcccactcttcatttccccgccgacctcaaaatggactacattgtgtccaaccccgactcccagaagaagctggaggccgacgagtggatccgacccatgtgcaccgtcaagcagatgtacgacatgttccagcgaggcaacgccctggttgaccccgattacgtggccaactaccagcgcgacgccgccgtgctcatctaccactcggaacacgacaagatcaactggtacgaggccagcaaaaagttcattgacgcggttcccgtcaaggacaagcagctgtttgatgccaagggatgcgagcactccattcatctggagcaggctgagaaggagaagcctgcctttgacacgttgatcaacttcttggacgagcacaccaagcagtag

SEQ ID NO: 1100 - protein, 310 aa, Yarrowia lipolytica CLIB122
MSTEATETHPFPVKHGKVSYYTAKDGQKLRVGEWGTELAQPKGKLVFNHGFTEHIGVFDELFKRMVDNGYYVLALDQRGAGEQCQGKKYGITNETFVYEDLNGVIKEYLVKNNSIEQSKKEKLFIWGHSMGGGIALNYGVKGLYRDHFTGFIGCAPLVQLHPASVPNFILRGAMEVLARAWPTLHFPADLKMDYIVSNPDSQKKLEADEWIRPMCTVKQMYDMFQRGNALVDPDYVANYQRDAAVLIYHSEHDKINWYEASKKFIDAVPVKDKQLFDAKGCEHSIHLEQAEKEKPAFDTLINFLDEHTKQ

SEQ ID NO: 1101 - DNA, 915 bp, Candida albicans SC5314
  CDS (1)..(915): transl_table=12
atgactaccgttgaaatcccatataaacctaaaggtacaccagaaattgaatttgtcgaacataatggtgccaattttaaaactgtcacttggaaagtcccgcaatcagtctcttacaagggtaaaataatctatgttcatggatttgctgaagaatcaaatgtttacactgaattttttgataatttgtctcaaaatggttacgaagttttctttttcgatcaaagaggtgctggtgaaacttcaccaggtaatttagttggcttaactgatgaatttcatgtcttcaatgatttagatttcttcattaaacgtaatttggatgctagaccagctgctaatagtaatgagaaattcttcttacttggacattccatgggaggtggaatcattttgaactatggtattagagggaaatatttaaatgatattagagccattgttgcttctggtccattgattcaattacatccaaatactcaacctaatattgttttaagaactttgcaaccagttattagtagattgttgcctaatttcaaaattgattccaaattaaactttgattatattacttccaacgagagatggaaaaactacattatagaacatgataaaaaattgattggatctgtgagacaattcaatgatatgtttgttagaggtgatgcattattgaaaccagaatatgttgctaaattcaaagatgatttacctttgttaattgttcatggtactaacgataatattaatgatattaaaggcagtgaacagtttttcaaattagttcctaatgatctgggtaataaacatttagagaaaattgaaaaaggtagacactcattatttattgaaaatgatgaattgtttaaattgatttttaaaagagtgatagatttcttaaatgaaaattag

SEQ ID NO: 1102 - protein, 304 aa, Candida albicans SC5314
MTTVEIPYKPKGTPEIEFVEHNGANFKTVTWKVPQSVSYKGKIIYVHGFAEESNVYTEFFDNLSQNGYEVFFFDQRGAGETSPGNLVGLTDEFHVFNDLDFFIKRNLDARPAANSNEKFFLLGHSMGGGIILNYGIRGKYLNDIRAIVASGPLIQLHPNTQPNIVLRTLQPVISRLLPNFKIDSKLNFDYITSNERWKNYIIEHDKKLIGSVRQFNDMFVRGDALLKPEYVAKFKDDLPLLIVHGTNDNINDIKGSEQFFKLVPNDSGNKHLEKIEKGRHSLFIENDELFKLIFKRVIDFLNEN

SEQ ID NO: 1103 - DNA, 915 bp, Candida albicans SC5314
  CDS (1)..(915): transl_table=12
atgactaccgttgaaatcccatataaacctaaaggtacaccagaaattgaatttgtcgaacataatggtgccaattttaaaactgtcacctggaaagtcccgcaatcagtctcttacaagggtaaaataatctatgttcatggatttgctgaagaatcaaatgtttacactgaattttttgataatttgtctcaaaatggttacgaagttttctttttcgatcaaagaggtgctggtgaaacttcaccaggtaatttagttggcttaactgatgaatttcatgtcttcaatgatttagatttcttcattaaacgtaatttggatgctagaccagctgctaatagtaatgagaaattcttcttacttggacattccatgggaggtggaatcattttgaactatggtattagagggaaatatttaaatgatattagagccattgttgcttctggtccgttgattcaattacatccaaatactcaacctaatattgttttaagaactttgcaaccagttattagtagattgttgcctaattttaaaattgattccaaattaaactttgattatattacttccaacgagagatggaaaaactacattatagaacatgataaaaaattgattggatctgtgagacaattcaatgatatgtttgttagaggtgatgcattattgaaaccagaatatgttgctaaattcaaagatgatttacctttgttaattgttcatggtactaatgataatattaatgatattaaaggcagtgaacagtttttcaaattagttcctaatgatctgggtaataaacatttagagaaaattgaaaaaggtagacactcattatttattgaaaatgatgaattgtttaaattgatttttaaaagagtagtagatttcttaaacgaaaattag

SEQ ID NO: 1104 - protein, 304 aa, Candida albicans SC5314
MTTVEIPYKPKGTPEIEFVEHNGANFKTVTWKVPQSVSYKGKIIYVHGFAEESNVYTEFFDNLSQNGYEVFFFDQRGAGETSPGNLVGLTDEFHVFNDLDFFIKRNLDARPAANSNEKFFLLGHSMGGGIILNYGIRGKYLNDIRAIVASGPLIQLHPNTQPNIVLRTLQPVISRLLPNFKIDSKLNFDYITSNERWKNYIIEHDKKLIGSVRQFNDMFVRGDALLKPEYVAKFKDDLPLLIVHGTNDNINDIKGSEQFFKLVPNDSGNKHLEKIEKGRHSLFIENDELFKLIFKRVVDFLNEN

SEQ ID NO: 1105 - DNA, 843 bp, Mycobacterium smegmatis str. MC2 155
  CDS (1)..(843): transl_table=11
atggtgagcagcacccgcagtgaacacagctttgccggcgtcggcggcgtccgcatcgtctacgacgtgtggacccccgacaccgacccgcgcggggtcgtcgtgctggcgcacggttacgccgaacacgcaggccgctaccaccacgtcgcgcaacggttcggggccgcgggcctgctcgtgtacgcactcgaccaccgcggacacggccgctccggcggtaagcgcgttcacctgcgcgacctgtcggagttcgtcgaggacttccgcacactcgtcggcatcgccgcgaacgaccaccccacactgccgcggatcgtgctcggccacagcatgggcggcggcatcgtcttcgcctatggcgctcggtacccgggcgagtactcggccatggtgctgtccgggcccgccgtgaacgcacacgacggcgtatcgccggtgctggtcgcggtggccaaagtgctgggcaaactcgcgcccggcatcccggtggagaacctggacgccgacgcggtctcgcgcgaccccgaggtggtcgcggcctacaaggccgatccgatggttcaccacggcaagctgcccgcgggcatcgcgcgcgcgctgatcggcctgggacagagcatgccgcagcgggccgcggcgctgaccgcgccgctgctggtggtgcacggcgacaaggaccgcctcatcccggtggcgggcagccggctgctcgtcgaccgcgtggcttccgaggatgtccacctgaaggtctaccccgggctgtaccacgaggtgttcaacgaacccgaacagaaactcgtcctcgacgacgtcacctcatggatcgtgagtcatctgtga

SEQ ID NO: 1106 - protein, 280 aa, Mycobacterium smegmatis str. MC2 155
MVSSTRSEHSFAGVGGVRIVYDVWTPDTDPRGVVVLAHGYAEHAGRYHHVAQRFGAAGLLVYALDHRGHGRSGGKRVHLRDLSEFVEDFRTLVGIAANDHPTLPRIVLGHSMGGGIVFAYGARYPGEYSAMVLSGPAVNAHDGVSPVLVAVAKVLGKLAPGIPVENLDADAVSRDPEVVAAYKADPMVHHGKLPAGIARALIGLGQSMPQRAAALTAPLLVVHGDKDRLIPVAGSRLLVDRVASEDVHLKVYPGLYHEVFNEPEQKLVLDDVTSWIVSHL

SEQ ID NO: 1107 - DNA, 915 bp, Oryza sativa
  CDS (1)..(915)
atggcgatccggaggctgcaggaggaggcggggacggggagcagcaggagggagttcgccgtgttcgagacggccaggggggacgctctcttcacgcagtcgtggaccccggtcgccgccgccgatcgcgtcaagggcatcgttgttctgttacatggactaaatgagcatagtgggaggtacaaccattttgcaaagctgttaaatgatcatgggcttaaagtttatgcaatggactggattggacatggtggaagtgatggggtgcatggctatgtttcatcgcttgatcatgctgttggtgacctgaaagaatttctagaggatgttgtactggaggaaaactatggtttgccatgtttcttatttggccactccacaggtggagctattgttttgaaggcagtcctggatccttgtgttgaagttcatgttgaaggtgtgatcttgacatctccggctattcatgttcaaccatctcatccaattatcaaagttgttgcacctatcttctctgtgttagctccaaaataccgagttgctgctttgcacaggagaggacctcctgtttcccgtgatcctgaggctttgaagatcaagtatgcagatccacttgtgtatactggacccattagagttagaactggcaatgaaattcttcggatatcatcatatttgcaaagaaacttaagcagagtaactgtcccttttttagttctgcatggcacagctgacacaataactgaccccggagcatctcaacgactgtaccaatcatcagcatcagcacataaatctataaaactgtatgatggatatttacatgatcttctctttgaacctgaaagggatgatatagcaaatgacatcatcaattggttaagctcaagacttgatgttctccagagatggtga

SEQ ID NO: 1108 - protein, 304 aa, Oryza sativa
MAIRRLQEEAGTGSSRREFAVFETARGDALFTQSWTPVAAADRVKGIVVLLHGLNEHSGRYNHFAKLLNDHGLKVYAMDWIGHGGSDGVHGYVSSLDHAVGDLKEFLEDVVLEENYGLPCFLFGHSTGGAIVLKAVLDPCVEVHVEGVILTSPAIHVQPSHPIIKVVAPIFSVLAPKYRVAALHRRGPPVSRDPEALKIKYADPLVYTGPIRVRTGNEILRISSYLQRNLSRVTVPFLVLHGTADTITDPGASQRLYQSSASAHKSIKLYDGYLHDLLFEPERDDIANDIINWLSSRLDVLQRW

SEQ ID NO: 1109 - DNA, 1152 bp, Arabidopsis thaliana
  CDS (1)..(1152)
atggaccaattaacatcaggcgcgagcaatcggataatatttatcttgagaacgcttaggaagtgtctcgtcttcgttctctctctcgtcctttctcttctccttattcttcgtctccgtcctcgtcgccgtgtctctcctctttcatcgcctgaggatgaggctgttccggctccttcgaggcgatggagacggaagatggcgtggaagctggaggaggaagatacggctagacgtcgttccttagcggaaggcgttgagatggccggagatggagagatctcttgttcgttgttttacggacgtcgtggtaacgctttattctctcggtcgtggttgcctatttccggcgaacttagggggattttgattattatccatggattgaatgaacacagtggaagatattctcaattcgctaagcagctaaacgcgagtaatttaggtgtatacgcaatggactggattggtcacggtgggagtgatggtttgcatggttatgttccttctcttgattatgttgtttccgacactgaagctttcttggaaaagattaggtctgagaatccgggggttccgtgtttcctctttggtcactctaccggtggagctgtggttttgaaggcagcttcatctccctctattgaagatatgttagccggtattgtcctaacatcgcctgcactccgtgtcaaacccgctcatcccattgtcggggcaatagctccaatcttctcattgctcgcaccaaggttccaattcaaaggagcaaacaagagaggcattccggtctcaagagaccctgaagctctcttagccaagtactctgatccgttagtctacactggtccgattagagtccgaacagggtatgagattcttcgcataacggcttacttgacccggaacttcaaatctgttacagtgcctttctttgttctccatggtacagaggacaaagtcactgatccactagcttcccaagacttgtataatcaggcaccatcagttttcaaagacatcaaactctatgacggtttcttacacgaccttctctttgaacctgagcgtgaggaagtcggtcgtgatatcatagattggatgatgaatcggcttgacgatgttaacggatcagcagctggcctctggtaa

SEQ ID NO: 1110 - protein, 383 aa, Arabidopsis thaliana
MDQLTSGASNRIIFILRTLRKCLVFVLSLVLSLLLILRLRPRRRVSPLSSPEDEAVPAPSRRWRRKMAWKLEEEDTARRRSLAEGVEMAGDGEISCSLFYGRRGNALFSRSWLPISGELRGILIIIHGLNEHSGRYSQFAKQLNASNLGVYAMDWIGHGGSDGLHGYVPSLDYVVSDTEAFLEKIRSENPGVPCFLFGHSTGGAVVLKAASSPSIEDMLAGIVLTSPALRVKPAHPIVGAIAPIFSLLAPRFQFKGANKRGIPVSRDPEALLAKYSDPLVYTGPIRVRTGYEILRITAYLTRNFKSVTVPFFVLHGTEDKVTDPLASQDLYNQAPSVFKDIKLYDGFLHDLLFEPEREEVGRDIIDWMMNRLDDVNGSAAGLW

SEQ ID NO: 1111 - DNA, 1224 bp, Arabidopsis thaliana
  CDS (1)..(1224)
atggcggtggaaacaatgtcgatgggatcagattcatcaactttgattctaacatcaggagcaagcggtcgcgttagggtactcttctcgatgcgagagcttaagcgtctcgttacgattatccaatcgttgattcttttcctcctccttccgtttcgcgtcgtcgtttggcggcggaggactggtgcggtggttatcagagacgataagcaagagaggaaggtttggtctcctccgcagatcgtggtgaggaagaggaacatcggtggcgaaagcagcgtttctcctccgtcggttccagctgcggtggtggatggggaggttgctgttcgacgtgaactggcgattaagcgagttttggaggatgaaggcggcgatggaagctccgtcagagattattcgctattcacgacgaagagaggagatacgttgtttagtcagtcatggtcacctctttccccaaatcacaggggacttattgttctgctacatggattaaacgagcataggtatagtgattttgcaaagcagcttaatgctaatgggttcaaggtctatggaattgactggatcggtcatggcggaagtgatggacttcatgcttacgttccttcccttgattacgctgtcacagatttgaaatcatttcttgaaaaggtattcacagagaatccaggactcccctgtttctgctttggacactcaacaggtggagcaatcatcctcaaggctatgctggatccaaagattgaatctcgagtttcaggcattgcattgacttcaccagctgttggagtccaaccatcccatccaatcttcgctgttcttgctccaatcatggcgtttctactacccaggtaccaaatcagtgcagcaaacaagaaaggaatgccggtttctcgtgacccagcagctctcatcgccaaatactctgacccattagtcttcaccggatccatccgggttaaaaccggctacgagatccttagaatcactgctcacttgcaacagaacctgaacaaagtgaaagttccctttcttgtgatgcacggtactgacgacacagttaccgatcctagcgcctcaaagaagctctacgaggaagctgcctcgtcagacaaatcactcaagctctacgacgggttgttgcacgatcttctttttgaacccgaacgagaaatcatcgctggagccatattagattggctaaaccagcgggtttag

SEQ ID NO: 1112 - protein, 407 aa, Arabidopsis thaliana
MAVETMSMGSDSSTLILTSGASGRVRVLFSMRELKRLVTIIQSLILFLLLPFRVVVWRRRTGAVVIRDDKQERKVWSPPQIVVRKRNIGGESSVSPPSVPAAVVDGEVAVRRELAIKRVLEDEGGDGSSVRDYSLFTTKRGDTLFSQSWSPLSPNHRGLIVLLHGLNEHRYSDFAKQLNANGFKVYGIDWIGHGGSDGLHAYVPSLDYAVTDLKSFLEKVFTENPGLPCFCFGHSTGGAIILKAMLDPKIESRVSGIALTSPAVGVQPSHPIFAVLAPIMAFLLPRYQISAANKKGMPVSRDPAALIAKYSDPLVFTGSIRVKTGYEILRITAHLQQNLNKVKVPFLVMHGTDDTVTDPSASKKLYEEAASSDKSLKLYDGLLHDLLFEPEREIIAGAILDWLNQRV

SEQ ID NO: 1113 - DNA, 942 bp, Saccharomyces cerevisiae
  CDS (1)..(942)
atggctccgtatccatacaaagtgcagacgacagtacctgaacttcaatacgaaaactttgatggtgctaagttcgggtacatgttctggcctgttcaaaatggcaccaatgaggtcagaggtagagttttactgattcatgggtttggcgagtacacaaagattcaattccggcttatggaccacttatcactcaatggttacgagtcatttacgtttgatcaaaggggtgctggtgttacatcgccgggcagatcgaaaggtgtaactgatgagtaccatgtgtttaacgatcttgagcattttgtggagaagaacttgagtgaatgtaaggccaaaggcatacccttgttcatgtgggggcattcaatgggcggtggtatctgcctaaactatgcctgccaaggtaagcacaaaaacgaaataagcggatatatcgggtcaggcccattaataattttacatccgcatacaatgtataacaaaccgacccaaattattgctccattattggcgaaatttttgccaagggtaaggatcgacactggtttagatcttaaaggaatcacatcagataaagcctatcgtgctttcctcggaagcgatcctatgtctgttccattatatgggtcgtttaggcaaatacacgactttatgcaacgtggtgccaagctctacaagaatgaaaacaattatattcagaagaacttcgctaaagacaaacccgttgttattatgcatggacaagacgacacaatcaacgatcctaagggctctgaaaagttcattcaggactgtccttctgctgacaaagaattaaagctgtatccgggcgcaagacattcgattttctcactagagacagatgaagtcttcaacacggtgttcaatgatatgaagcaatggttggacaaacacaccacgaccgaagctaaaccataa

SEQ ID NO: 1114 - protein, 313 aa, Saccharomyces cerevisiae
MAPYPYKVQTTVPELQYENFDGAKFGYMFWPVQNGTNEVRGRVLLIHGFGEYTKIQFRLMDHLSLNGYESFTFDQRGAGVTSPGRSKGVTDEYHVFNDLEHFVEKNLSECKAKGIPLFMWGHSMGGGICLNYACQGKHKNEISGYIGSGPLIILHPHTMYNKPTQIIAPLLAKFLPRVRIDTGLDLKGITSDKAYRAFLGSDPMSVPLYGSFRQIHDFMQRGAKLYKNENNYIQKNFAKDKPVVIMHGQDDTINDPKGSEKFIQDCPSADKELKLYPGARHSIFSLETDEVFNTVFNDMKQWLDKHTTTEAKP

SEQ ID NO: 1115 - DNA, 975 bp, Arabidopsis thaliana
  CDS (1)..(975)
atgtctgatcaacagcttgaaacagagatcaacttctggggagagacttcagaagaagattactttaatctcaaaggcatcatcggctccaaatctttcttcacttcccctcgaggtctcaacctcttcactcgttcatggcttccctcttcctcttctccgccacgtggtctcatcttcatggtccatggctacggcaatgacgtcagctggactttccagtccactcccatttttcttgctcagatgggtttcgcttgctttgctctcgacatcgaaggtcatggccgatctgacggtgtccgcgcctatgttccctccgtagatctagtcgtcgatgacatcatctctttctttaattcgattaagcaaaaccctaaatttcaaggcttacctcggtttctcttcggagaatcaatgggcggtgcgatttgtcttttgatccaattcgctgatccgttagggtttgatggagcggttttggttgctcccatgtgtaaaatctcggacaaggtgagacctaaatggccggttgatcagtttctgattatgatctcaagattcttgccgacttgggcgattgttccgacggaagatctgttggagaagtcgatcaaagttgaagagaagaaaccgattgccaagaggaatccgatgaggtacaatgagaaaccgcggttaggtacagtgatggagctacttagggttactgattacttagggaagaagctaaaagatgttagcattcccttcattattgtgcacggaagtgcagatgctgtgactgatcctgaagtgagcagagagttgtacgaacatgctaagagcaaagataagacattgaagatctatgacgggatgatgcattcgatgttgttcggtgaacccgacgacaacattgagattgttcgtaaagatattgttagctggttgaatgatagatgtggtggagacaaaaccaaaacccaggtttga

SEQ ID NO: 1116 - protein, 324 aa, Arabidopsis thaliana
MSDQQLETEINFWGETSEEDYFNLKGIIGSKSFFTSPRGLNLFTRSWLPSSSSPPRGLIFMVHGYGNDVSWTFQSTPIFLAQMGFACFALDIEGHGRSDGVRAYVPSVDLVVDDIISFFNSIKQNPKFQGLPRFLFGESMGGAICLLIQFADPLGFDGAVLVAPMCKISDKVRPKWPVDQFLIMISRFLPTWAIVPTEDLLEKSIKVEEKKPIAKRNPMRYNEKPRLGTVMELLRVTDYLGKKLKDVSIPFIIVHGSADAVTDPEVSRELYEHAKSKDKTLKIYDGMMHSMLFGEPDDNIEIVRKDIVSWLNDRCGGDKTKTQV

SEQ ID NO: 1117 - DNA, 1149 bp, Arabidopsis thaliana
  CDS (1)..(1149)
atggatcgtgctttaactccgcgttttgatactccagctactctctcccctttccgataccgatatgggagctctctggccatcactcgacgattcgcgccggcgattgtttgcgcgaaacgatctccgatcgatggagtgagcgacgagctgaatctgattgcttcacagaacttagatcaagctcccgcacgaagactagcccgttccgcttttgttgacttgcagcttcagctggatcactgcttgttcaagaaagctccgagtgggatcagaacagaggagtggtatgagagaaattcgaaaggggaagatattttctgcaagagttggttgccgaaatccggcgacgaaatcaaagctgctgtatgtttctgtcatggctatggaagcacttgcactttcttcttcgatggtatagcaaagcaaatagcaggttttggttatggggtttatgctatagaccatcctggttttggtttatcagatggtttacatggtcacattccaagttttgatgacttagcagacaatgctattgaacagttcaccaaaatgaaagggagatcggaattgagaaatttgccccggtttttgctgggacagtcaatgggaggagcagttgccttaaaaattcatcttaaagaacctcaagcttgggatggtcttatccttgtcgctccaatgtgtaagatttcagaagatgtaaaacctcctccactagtcttgaagacgttaatcttgatgtcgacactatttcccaaagcaaagctctttccaaagagagacttgagcgacttcttcttcagggacctgagtaaaagaaaattgtgtgagtacgatgtgatatgctacgatgatcaaacacgtctcaaaactgctgttgaacttctaaatgcaacaagagacattgagatgcaagttgacaaggtctcgttgccactgttgatacttcatggagacactgataaagtcacagatcccactgtgagtaaattccttcacaaacatgcagtcagccaagacaagactctaaaactctatccaggtggctaccattgcattctagaaggtgatacagacgaaaatattttcactgtaatcaatgacatcgttgcttggctcgatgcccgcgttgatcccaagtaa

SEQ ID NO: 1118 - protein, 382 aa, Arabidopsis thaliana
MDRALTPRFDTPATLSPFRYRYGSSLAITRRFAPAIVCAKRSPIDGVSDELNLIASQNLDQAPARRLARSAFVDLQLQLDHCLFKKAPSGIRTEEWYERNSKGEDIFCKSWLPKSGDEIKAAVCFCHGYGSTCTFFFDGIAKQIAGFGYGVYAIDHPGFGLSDGLHGHIPSFDDLADNAIEQFTKMKGRSELRNLPRFLLGQSMGGAVALKIHLKEPQAWDGLILVAPMCKISEDVKPPPLVLKTLILMSTLFPKAKLFPKRDLSDFFFRDLSKRKLCEYDVICYDDQTRLKTAVELLNATRDIEMQVDKVSLPLLILHGDTDKVTDPTVSKFLHKHAVSQDKTLKLYPGGYHCILEGDTDENIFTVINDIVAWLDARVDPK

SEQ ID NO: 1119 - DNA, 936 bp, Arabidopsis thaliana
  CDS (1)..(936)
atggttatgtatgaagaggattttgtgttgaactcacgaggcatgaagttgttcacttgtgtatggaaaccagtgaagcaagaaccaaaggcattgctcttcctctgccatggctacgctatggagtccagcatcaccatgaacagcgcagccacgaggttagccaatgccggttttgccgtatatggaatggactatgaaggacatggaaaatctgagggtctaaatggttacatcagtaactttgatgatctcgttgatgatgtctctaatcattattctacaatttgtgagagggaagagaacaaggggaagatgaggttcctacttggagaatccatgggaggagcagttgtgttgctcttagccagaaagaagcctgatttttgggacggtgccgttttggtagcacccatgtgtaagttagcagacgagataaagccacatccagtagtgatctcaatccttatcaagttagccaagtttattccaacgtggaaaatagttccaggaaatgatattattgacattgcaattaaagaacctcacatcagaaatcaggtgagggagaacaagtattgctataaaggccggcctcgcctcaacaccgcctaccaactcttgttggttagcttagatcttgagaagaatcttcaccaggtatcaattcctttcattgttcttcacggagaagatgataaagtgacggataaaagcataagcaaaatgttatacgaagtggcttcaagctcggacaagacattcaagctgtaccccaaaatgtggcatgctttgttgtatggggaaactaatgaaaattcagaaattgtgtttggtgatatcataaactggttggaagatagagccacagattcgaacggagggttagagagtcagctaaaacataagcatgatggattcttgaagcataaataa

SEQ ID NO: 1120 - protein, 311 aa, Arabidopsis thaliana
MVMYEEDFVLNSRGMKLFTCVWKPVKQEPKALLFLCHGYAMESSITMNSAATRLANAGFAVYGMDYEGHGKSEGLNGYISNFDDLVDDVSNHYSTICEREENKGKMRFLLGESMGGAVVLLLARKKPDFWDGAVLVAPMCKLADEIKPHPVVISILIKLAKFIPTWKIVPGNDIIDIAIKEPHIRNQVRENKYCYKGRPRLNTAYQLLLVSLDLEKNLHQVSIPFIVLHGEDDKVTDKSISKMLYEVASSSDKTFKLYPKMWHALLYGETNENSEIVFGDIINWLEDRATDSNGGLESQLKHKHDGFLKHK

SEQ ID NO: 1121 - DNA, 954 bp, Arabidopsis thaliana
  CDS (1)..(954)
atggcaagtgaaacagagaacatcaagtatgaagagagtttcatcaagaacactcgaggaatgaaactgttcacgtgcaaatgggtaccagcaaagcaagagccaaaggctttagtctttatttgccatggatatgcaatggaatgtagcatcaccatgaacagtactgcgaggaggctggtgaaagcaggatttgcggtatatggaattgattacgaagggcatggaaaatctgatgggcttagtgcttatgtcccaaactttgaccatctcgttgatgatgtctctactcactacacaagcatttgcgagaaagaagagaataaagggaagatgaggttcttgttaggagaatcaatgggaggagcagtgcttttgttgttacacagaaagaagcctcagttttgggatggggctgtcttggttgctccaatgtgtaagattgctgaagaaatgaaaccaagccctttggtaatttcgatattggccaaacttagtggagtgataccttcgtggaaaatcatccctggccaagatatcattgagactgcttttaagcagccagaaatcaggaaacaggttagggaaaatccctactgctacaagggacgtccacgtttgaagactgcttatgagcttttgagggttagcaccgatctcgagaagaggcttaatgaggtttcattaccgttcatagttttgcacggtgaagacgataaagtcacagataaagcggtgagtcgacaactgtatgaagttgcatctagttcggacaagactttcaagttgtaccctgggatgtggcatggtttactctatggagagacaccagagaatatcgagactgtttttgctgacatcattggctggttggataagaaagttgctgatgaaagtggaggctttgaatccgagcttaaacgtaaaaatgatggtattcctttgaaagggtag

SEQ ID NO: 1122 - protein, 317 aa, Arabidopsis thaliana
MASETENIKYEESFIKNTRGMKLFTCKWVPAKQEPKALVFICHGYAMECSITMNSTARRLVKAGFAVYGIDYEGHGKSDGLSAYVPNFDHLVDDVSTHYTSICEKEENKGKMRFLLGESMGGAVLLLLHRKKPQFWDGAVLVAPMCKIAEEMKPSPLVISILAKLSGVIPSWKIIPGQDIIETAFKQPEIRKQVRENPYCYKGRPRLKTAYELLRVSTDLEKRLNEVSLPFIVLHGEDDKVTDKAVSRQLYEVASSSDKTFKLYPGMWHGLLYGETPENIETVFADIIGWLDKKVADESGGFESELKRKNDGIPLKG

SEQ ID NO: 1123 - DNA, 1056 bp, Arabidopsis thaliana
  CDS (1)..(1056)
atgaagtcgtcggaattccaataccacgaggaatacgtgagaaattcaagaggtgtagagttgttcgcatgtagatggatcccatcttcttcgtcttctcccaaagctctggttttcctctgccatggttatggaatggagtgtagcgactccatgaaagaatgcggaatcaggctggcttcagctggatacgcggtttttggtatggactatgaaggtcatggaaggtccatgggatctcgttgctacatcaagaagtttgcgaatgttgtgaatgattgctatgactactacacatctatttgtgcgcaagaggagtacatggacaaaggcagattcttgtatggagaatccatgggaggcgcagtcactttattgcttcacaaaaaagatcctttgttttggaacggcgccattctagttgctccaatgtgtaagatatctgagaaggtgaagccacaccctatagtgattaatctgttaactagagtcgaagaaatcatacctaaatggaaaatagttccaacaaaagacgtgattgacgctgctttcaaggacctcgtcaagcgagaagaggtaaggaacaacaagctgatatatcaagacaagcctaggctcaaaaccgcacttgagatgcttaggacaagcatgaacctagaagacactctccacgagataacaatgccattctttgtattacacggagaagcagatacagtgacggatccagaggtaagcaaagctctgtacgagaaagctagcacaagggacaagacgctcaagttgtatccagggatgtggcacgctctgacgtcaggtgagcctgactgtaacgtggaccttgtttttgctgacatcatcaattggcttgaccttcgaaccgctgaccctgcctctctcactgtcactcctatacgagttggtaacactacgagcgtccagagggtaactactgttaacggcgttagtaacggtcataggaggcctaaacgtcccttcttcaatctcctttgtggtttgaaccgtggccgtttggttccacgatccactgtgtaa

SEQ ID NO: 1124 - protein, 351 aa, Arabidopsis thaliana
MKSSEFQYHEEYVRNSRGVELFACRWIPSSSSSPKALVFLCHGYGMECSDSMKECGIRLASAGYAVFGMDYEGHGRSMGSRCYIKKFANVVNDCYDYYTSICAQEEYMDKGRFLYGESMGGAVTLLLHKKDPLFWNGAILVAPMCKISEKVKPHPIVINLLTRVEEIIPKWKIVPTKDVIDAAFKDLVKREEVRNNKLIYQDKPRLKTALEMLRTSMNLEDTLHEITMPFFVLHGEADTVTDPEVSKALYEKASTRDKTLKLYPGMWHALTSGEPDCNVDLVFADIINWLDLRTADPASLTVTPIRVGNTTSVQRVTTVNGVSNGHRRPKRPFFNLLCGLNRGRLVPRSTV

SEQ ID NO: 1125 - DNA, 939 bp, Arabidopsis thaliana
  CDS (1)..(939)
atggttatgtacaaagaggattatgtttcgaactcacgagggatacaacttttcacgtgttcatggaaacaagaggagcagcaagaaccaaaggctttaatctttctctgtcatggctacgccatggaatcaagcatcaccatgagcagcactgcagtgaggttggccaatgcgggtttctcggtctatggaatggactatgaagggcatggtaaatccgggggattaaatggttacgtcaaaaagtttgatgatcttgttcaagacgtctcttctcattactcttcaatttgcgagttggaagagaataaggggaagatgaggtttctaatgggagaatccatgggaggagcagttgtgttactcttggagagaaagaagcccaatttttgggacggtgccgttttagtcgctcccatgtgtaagttagcagaagacataaagccacatccaatggtgatctcatttctcacaaagctaactcggtttattccaacttggaagatagttcctagcaacgatattattgacgtagcatttaaagaaacccacataagaaaacaggtaagggacaatgagtattgctacaagggccgtcctcgcttgaaaaccgctcaccaacttttaatggttagcttggatcttgagaagaatcttgatcaggtatcgatgccatttattgtccttcacggtgaagatgataaagttacagacaaaaacgtaagcaaactattatacgaggtagcttcaagttcggacaagacttttaagttatacccgaacatgtggcatgggctcttatacggagaatctcctgagaatttggagattgtgtttagtgatatcataagctggttaaaggagagagcttctgtcacaaaccaaaagttggagactgagttaaagcatgtagatgatggtttttctatgcaaaaatga

SEQ ID NO: 1126 - protein, 312 aa, Arabidopsis thaliana
MVMYKEDYVSNSRGIQLFTCSWKQEEQQEPKALIFLCHGYAMESSITMSSTAVRLANAGFSVYGMDYEGHGKSGGLNGYVKKFDDLVQDVSSHYSSICELEENKGKMRFLMGESMGGAVVLLLERKKPNFWDGAVLVAPMCKLAEDIKPHPMVISFLTKLTRFIPTWKIVPSNDIIDVAFKETHIRKQVRDNEYCYKGRPRLKTAHQLLMVSLDLEKNLDQVSMPFIVLHGEDDKVTDKNVSKLLYEVASSSDKTFKLYPNMWHGLLYGESPENLEIVFSDIISWLKERASVTNQKLETELKHVDDGFSMQK

SEQ ID NO: 1127 - DNA, 1047 bp, Arabidopsis thaliana
  CDS (1)..(1047)
atgatgaagttcaagttccagtacgaggaggaatacatcaaaaactcgagagacgttgagttgttcgcttgcagatggcttccttcttcttctccccgagctctagtcttcctctgccatggttatggaatggagtgcagtagcttcatgagagaatgcggaatacggctggcatcagcgggatatgcagtgtttgggatggactacgaggggcatggtcggtccaagggtgctcgttgctatataaaaaaattcagtaatatagtaaatgactgctttgactattacacatccatctctgcacaagaagaatacaaagagaaaggtagatttttgtatggagaatcaatgggaggtgcagttgctttgttgcttcacaagaaagatccttctttttggaacggggctcttctcgttgctcccatgtgtaagatatcagagaaggtgaaaccacacccagtagtcataaatctactaacgagagttgaagatattataccaaaatggaagatagttcctacaaaagatgttatcgatgctgccttcaaggatccggtcaagcgcgaagagataaggaacaacaagctgatatatcaagacaagccaagacttaaaaccgcacttgaaatgcttagaacgagcatggaccttgaagacactctccacgagatcacattgcctttctttgtccttcacggtgaagcagacattgtgactgatccagagataagcaaagccttgttcgagaaggcaagcacacgcgacaaaaccattaaactttacccaggaatgtggcatggattaacttctggtgagcctgatgctaacgttgacctcgtttttgctgacattgtcaattggcttgatgctcgtaccggcgactccgcttctctgacagtcactcccgtacatgattttacctccaatgttcaaaaggtcgttgacggtgttagtaacggtcaaggaaaatctaaacgaccacaagctagtctcctttgtggtttaaatggtggtggacgtcgtttggtccatagatcttctatgtaa

SEQ ID NO: 1128 - protein, 348 aa, Arabidopsis thaliana
MMKFKFQYEEEYIKNSRDVELFACRWLPSSSPRALVFLCHGYGMECSSFMRECGIRLASAGYAVFGMDYEGHGRSKGARCYIKKFSNIVNDCFDYYTSISAQEEYKEKGRFLYGESMGGAVALLLHKKDPSFWNGALLVAPMCKISEKVKPHPVVINLLTRVEDIIPKWKIVPTKDVIDAAFKDPVKREEIRNNKLIYQDKPRLKTALEMLRTSMDLEDTLHEITLPFFVLHGEADIVTDPEISKALFEKASTRDKTIKLYPGMWHGLTSGEPDANVDLVFADIVNWLDARTGDSASLTVTPVHDFTSNVQKVVDGVSNGQGKSKRPQASLLCGLNGGGRRLVHRSSM

SEQ ID NO: 1129 - DNA, 984 bp, Arabidopsis thaliana
  CDS (1)..(984)
atgggactccatccagtctcagaggccaacgcctcaagcccctttggttccctctctgcggctgaattctactcccgccactccgtcacccactcctccgcttacgtcaccaaccccaccggtctcaaactctttacccaatggtggactccactcaaccgtccaccactcggcctcattgctgttgtccacggcttcaccggcgaatccagctggttcctccaactaacatcagtcctcttcgcaaaatccggatacctcacttgcgccatcgaccaccaaggccacggcttctcagacggtttgaccgctcacatcccaaacatcaacctcattgttgacgactgcatttccttctttgacgacttccgtaaacgtcacgcttcctcctttctcccggccttcctctactctgaatcccttggtggcgcaatcgctctgtacattactctccgccagaaacaccaatggaacggtcttatcctcagcggtgcaatgtgctccatcagtcacaaatttaaacctccatggccgttacaacacctcttaaccctagctgctactctcatccccacctggcgcgtcgtcccaactcgcggctccatcgccggcgtctctttcaaggagccatggaaacggaaactcgcctatgctaacccaaacagaaccgtcggtaaaccacgagcagccacggcctatgagctcgtacgagtctgcgaggatcttcaaaacaggtttgaagaagttgaagtcccgttgatgattgtgcacggtagagacgacgtcgtctgcgatccagcctccgtcgaagagctttaccggagatgcagtagcagagacaagacgataaagatttatccagggatgtggcatcagctgattggagagtcagaggagaacgtcgacttggtgttcggtgatgttttggattggattaagacacgatctgaaatctccaccattcatggtggtaccaaagcttaa

SEQ ID NO: 1130 - protein, 327 aa, Arabidopsis thaliana
MGLHPVSEANASSPFGSLSAAEFYSRHSVTHSSAYVTNPTGLKLFTQWWTPLNRPPLGLIAVVHGFTGESSWFLQLTSVLFAKSGYLTCAIDHQGHGFSDGLTAHIPNINLIVDDCISFFDDFRKRHASSFLPAFLYSESLGGAIALYITLRQKHQWNGLILSGAMCSISHKFKPPWPLQHLLTLAATLIPTWRVVPTRGSIAGVSFKEPWKRKLAYANPNRTVGKPRAATAYELVRVCEDLQNRFEEVEVPLMIVHGRDDVVCDPASVEELYRRCSSRDKTIKIYPGMWHQLIGESEENVDLVFGDVLDWIKTRSEISTIHGGTKA

SEQ ID NO: 1131 - DNA, 1056 bp, Arabidopsis thaliana
  CDS (1)..(1056)
atggctccgacggcgacgctggacaacaatgaggagctccggcgactcagggaggttaatattgacgaagctccggggcgtcgtcgtgttcgtgattccttgaaagatattcagcttaatctcgatcatatcctcttcaagacaccagaaaatgggattaagacaaaggagtcttttgaggtgaattcgagaggagttgagattttctctaaaagctggcttcctgaagcttctaagcctagagctttggtttgtttctgccatggttatggagatacttgcacatttttcttcgaaggaattgcaaggagattggcattgtctggatatggagttttcgctatggattatccgggattcggcttatcagagggcttgcatggttatatccctagctttgatctccttgttcaagatgttattgagcattactccaacattaaagcgaatcctgagtttagttctctaccgagctttctctttggacagtcaatgggtggagctgtgtcactcaaaatacatctcaaacaaccaaatgcgtgggccggcgcagtcttgttagcaccaatgtgcaaaattgcagatgatttggttccaccacctgtattgaaacagattttgatcggtctagctaatgttctaccaaaacacaagttggttccacaaaaggatttagcagaagcagggtttagagatatcaggaagagggatatgacaccatacaacatgatttgttacagcggcaaaccacggctacggactgcagtagaaatgcttcgaacaactcaggacattgaaaaacaattgcaggaggtatctttgccgatattgattctacatggagaagctgatacagtgacagatccttcagtgagcagagagttgtacgagaaagccaaaagtccagacaagaagatagttttgtatgaaaatgcttatcattctctgctcgaaggcgaaccagacgacatgattctccgtgtcttgtccgatattatctcgtggctcaatgaccatagcttgcaagctgagggatcatctgttactactatgtag

SEQ ID NO: 1132 - protein, 351 aa, Arabidopsis thaliana
MAPTATLDNNEELRRLREVNIDEAPGRRRVRDSLKDIQLNLDHILFKTPENGIKTKESFEVNSRGVEIFSKSWLPEASKPRALVCFCHGYGDTCTFFFEGIARRLALSGYGVFAMDYPGFGLSEGLHGYIPSFDLLVQDVIEHYSNIKANPEFSSLPSFLFGQSMGGAVSLKIHLKQPNAWAGAVLLAPMCKIADDLVPPPVLKQILIGLANVLPKHKLVPQKDLAEAGFRDIRKRDMTPYNMICYSGKPRLRTAVEMLRTTQDIEKQLQEVSLPILILHGEADTVTDPSVSRELYEKAKSPDKKIVLYENAYHSLLEGEPDDMILRVLSDIISWLNDHSLQAEGSSVTTM

SEQ ID NO: 1133 - DNA, 993 bp, Arabidopsis thaliana
  CDS (1)..(993)
atggggttgcatccaatttccgacgccaatgaacacaatcccttcggctctctcaccgccgacgaattctacgccaaacattccgttagccactcctccgctttcatcaccaaccctcgcggtctcaaactcttcactcaatggtggtcaccactccctccaactaaaccaatcggtatcatcgctgtcgttcatggcttcaccggcgaatccagttggttccttcagctcacatcaatcctcttcgctaaatccggtttcataacctgcgcaattgatcaccaaggccatggattctccgatggactcatcgctcatatccctgacatcaatcccgtcgtcgatgactgtatctctttcttcgatgacttccgtagccgtcaaacaccgtcagatctgccgtgttttctctactctgaatccctaggcggcgcgattgctctctacatctcgcttcgtcagagaggtgtttgggatggacttatcctcaacggagctatgtgtggaatcagcgataaattcaaaccgccgtggccgttggagcatttgctattcgtcgtcgcgaatcttatccctacttggcgcgttatccccactcgcggatctattcccgatgtttcgttcaaggagccgtggaagaggaagcttgccatggctagcccaaggaggacggtggcgaaaccacgggccgctactgcttatgagctgattcgtgtttgtaaggatctgcaggggaggtttgaggaagtggaggttccgcttctgattgtgcacggcggaggtgatgttgtatgcgacgtagcgtgtgttgaggagcttcatcggagagcgattagtgaggataagacgatcaagatctaccctgagttgtggcatcagatgattggggaatcggaggagaaagtcgatctggtttacggtgatatgctgagctggctcaagagtcgagctgaaaggaaggcacgcgccgccgttgatggaggagcagcttag

SEQ ID NO: 1134 - protein, 330 aa, Arabidopsis thaliana
MGLHPISDANEHNPFGSLTADEFYAKHSVSHSSAFITNPRGLKLFTQWWSPLPPTKPIGIIAVVHGFTGESSWFLQLTSILFAKSGFITCAIDHQGHGFSDGLIAHIPDINPVVDDCISFFDDFRSRQTPSDLPCFLYSESLGGAIALYISLRQRGVWDGLILNGAMCGISDKFKPPWPLEHLLFVVANLIPTWRVIPTRGSIPDVSFKEPWKRKLAMASPRRTVAKPRAATAYELIRVCKDLQGRFEEVEVPLLIVHGGGDVVCDVACVEELHRRAISEDKTIKIYPELWHQMIGESEEKVDLVYGDMLSWLKSRAERKARAAVDGGAA

SEQ ID NO: 1135 - DNA, 876 bp, Oryza sativa
  CDS (1)..(876)
atgctaatgttaagaacagtttatttttactttgcagtgacactgttgtacaattgcttccactttcaatttatactgatcatttcctctctttactttaggggtattttggtcatcatacatgggcttaatgagcacagtggaaggtatttgcactttgcggagctgctcacatcatgtggctttggagtatatgcaatggactggataggccatggtggaagcgatggtctacatggttatgtgccttcactagattatgttgtagaagatatagatgtacttcttggtaaaattgtgcttgagaatccaggggtcccctgttttcttcttggtcactccactggtggagctgttgttttgaaggcatcattgttccctcgtatcagagcaaaactggaaggcatcatcctaacttcaccagctctgcgtgtaaaacctgctcatcccattgtaggggctgtggcgccaatattctctctgttagcaccaaagtttcagttcaagggagctaacaagagaggcatcccggtgtcccgcgacccggctgccctgctagcgaagtactccgatccgctggtttacaccgggccgatcagagttcggaccggccatgaaatcctacgcatctcctcctacctgctgcacaacttgaagaaggtcaccgtcccattcatggtcctccatggaaccgcagaccgggtgaccgaccccctggcttcacaggacctctacaacgaggcctcatcgaggcacaaggatctgaggctgtacgatgggttcttgcacgatctgctctttgagcctgagcgtgatgagatcgccacagacatcatcgactggatggagcgaatgctagctctgcaaaccgtgtga

SEQ ID NO: 1136 - protein, 291 aa, Oryza sativa
MLMLRTVYFYFAVTLLYNCFHFQFILIISSLYFRGILVIIHGLNEHSGRYLHFAELLTSCGFGVYAMDWIGHGGSDGLHGYVPSLDYVVEDIDVLLGKIVLENPGVPCFLLGHSTGGAVVLKASLFPRIRAKLEGIILTSPALRVKPAHPIVGAVAPIFSLLAPKFQFKGANKRGIPVSRDPAALLAKYSDPLVYTGPIRVRTGHEILRISSYLLHNLKKVTVPFMVLHGTADRVTDPLASQDLYNEASSRHKDLRLYDGFLHDLLFEPERDEIATDIIDWMERMLALQTV

SEQ ID NO: 1137 - DNA, 1164 bp, Oryza sativa
  CDS (1)..(1164)
atggcggcgatcttgcagccgccgcgccacgccgcggtggtggcgccgcggcgggcggggaggctcgcgaggccggggtgcgcgggggggaggagggcggcggtggcggtggcggctgccggcggcgccgccagggacaggaagccgccgaggctggagggcgcgagcgaggagctgagggccgccgcggcgcagtgcctcgactgggcccccgcgcgccgccgcgtgcgcggcgccttcgcgcctgtgctccccaccctcgaccactgcctgttcaagatggctcccaagggaatccagatggaagagaattttgaaaccaattcaaagggggttgagattttctggaagagttggctgcctagggagggcactgccaccaaggcagcacttttcttctgccatggatatggtgatacttgcactttctttttcgaagggattgcgaagagaattgcagcagcaggatatgcagtatatgctatggattatcctggttttggtttatcatatggtcttcatggctacattgccagctttgatggaatggtggaacatgtcattgaacaatactcacggataaaaggcaggaaggaggtccgtgggctcccacattttctattgggacaatcaatgggaggtgcagtggctttgaaagtacacctgaaacaaccaaaagaatgggatggagtgcttcttgttgcacctatgtgcaagatttcagaagatgttacaccaccagcgccagtgttgaaggcattgagcatattgtcatgccttcttccagaagcaaagttatttccacaaaaagatattggagatttggcatttagagatccaagtaaaagaaaagtagctgagtacaatgccatttcatatacccaacaaatgaggttgaggacagcagttgaacttttgaaggctacaaaggacatagaatcccagttggagaagatttgttccccattgctgattctccacggagcagcagacttggttaccgacccccatgtcagcgaattcctgtacgagaaagctagcacaaaagacaagactctcaagctctacgaagatggatatcattctatcttagagggtgaacctgatgaccggatttcaactgccattaacgacatcatttcatggctggattcgcactgctga

SEQ ID NO: 1138 - protein, 387 aa, Oryza sativa
MAAILQPPRHAAVVAPRRAGRLARPGCAGGRRAAVAVAAAGGAARDRKPPRLEGASEELRAAAAQCLDWAPARRRVRGAFAPVLPTLDHCLFKMAPKGIQMEENFETNSKGVEIFWKSWLPREGTATKAALFFCHGYGDTCTFFFEGIAKRIAAAGYAVYAMDYPGFGLSYGLHGYIASFDGMVEHVIEQYSRIKGRKEVRGLPHFLLGQSMGGAVALKVHLKQPKEWDGVLLVAPMCKISEDVTPPAPVLKALSILSCLLPEAKLFPQKDIGDLAFRDPSKRKVAEYNAISYTQQMRLRTAVELLKATKDIESQLEKICSPLLILHGAADLVTDPHVSEFLYEKASTKDKTLKLYEDGYHSILEGEPDDRISTAINDIISWLDSHC

SEQ ID NO: 1139 - DNA, 921 bp, Oryza sativa
  CDS (1)..(921)
atggccatggatcagtacagtgagaatatcaagtatgacgaggagttttttgtgaactcccgtgacaacaagctgttcacctgcagatggacaccgcataaacaagaaccaaaagctctgatctttatctgtcatggaatcgcagcagagtgcggcgtatcgatgagagacaccgccgctcgattggtgcgagccggatatgccgtttacgggattgatcatgaaggccacggtagatcatctggtcagagatgctacataccaaacttcggtgacatcgtctcagactgcgcaaactttttcacgagtatttgcgagaagccggagaacagggagaagaagaggttcctgtacggcatctccatgggtggaggcgtggcgcttctcctccacaggaaggagccaacctactgggatggcgccgtcttgcttgctcctatgtgcaagattcctgatgacatgcggcctcacccgatcgcggtcagcgctctgaaaatggtgtgcgctgtggctcctagttggagaatcatacccacaccggacataattgacaaagtttgtaaagatccagagatgagaaagcaggttcgctcaaatccgtacatatacaggggaaagctcccactgaagacctgtcatgaactcctgatggtcagcctagacattgagaagaacctgcatgaggtgacactgccgttcttggtcctacacggcggagacgacatcgtgaccgatccttcggtgagcaagctgctgttcgaagaagcatcaggcagggacaaaactttcaagctttaccctgggatgtggcatgctctgacggctgagcttcctgacgatgtcgagcgtgtctattctgacatcatctcctggctggacgaaaggtcggattgtgcaggcagtgttcctgaaactttctga

SEQ ID NO: 1140 - protein, 306 aa, Oryza sativa
MAMDQYSENIKYDEEFFVNSRDNKLFTCRWTPHKQEPKALIFICHGIAAECGVSMRDTAARLVRAGYAVYGIDHEGHGRSSGQRCYIPNFGDIVSDCANFFTSICEKPENREKKRFLYGISMGGGVALLLHRKEPTYWDGAVLLAPMCKIPDDMRPHPIAVSALKMVCAVAPSWRIIPTPDIIDKVCKDPEMRKQVRSNPYIYRGKLPLKTCHELLMVSLDIEKNLHEVTLPFLVLHGGDDIVTDPSVSKLLFEEASGRDKTFKLYPGMWHALTAELPDDVERVYSDIISWLDERSDCAGSVPETF

SEQ ID NO: 1141 - DNA, 1032 bp, Oryza sativa
  CDS (1)..(1032)
atggcgccgccaccgccgccaccgacggcgacgaagtacttctggggcgactccccggagcccgacgagtactacgcctcgctgggtctccgccacgccgaggcctacttccagtccccctgcggccgcctcttcacgcactcgttccacccgctctccgccgccagcgacggcgacgtcaagggcgtcgtcttcatgagccacggctacggctccgactcctcgtggatgttccagaacatcgccatcagctacgcgcggtgggggtacgccgtcttctgcgccgacctgctcggacacggccgctccgacggcgtccgcggctacctcggcgacacggaggccgtcgcgagggcggcgctctccttcttcctctccgtgcggcggagcggcgcctacgcctccctcccggcgttcctcttcggcgagtccatgggcggcgccaccaccctgctcgcctacctccgctccccgcccgacgccgggtgggcggggatcatcctgtcggcgccgctgctcgtcttccccgacgacatgtacccgtcccgcgtgcggctcttcctgtacggcctcctcttcggcctagccgacacatgggcggtgatgccggacaagaggatggtggggagatcgatccgcgacccggcgaagctgagggtgatcgcgtccaacccgcggctgtaccgcggctcgccgcgggtggggacgatgcgggagctcgcacgcgtgacggcgctgctgcgggagagcttcggggaggtggcggcgccgttcctggtggtgcacggcaccgacgacggggtgacctcgccggaggggtccaggatgctgtacgagcgcgcggcgagcgaggacaagagcctcatcctctacgacgggatgtaccactcgctcatccagggggagtccgacgagaaccgcgaccgcgtgctcgccgacatgcgcgcctggatcgacgagcgcgtccgccgctacggcgccggcgccggcgccgcggcggccgacggccacgccgaggcgcccgcggcctga

SEQ ID NO: 1142 - protein, 343 aa, Oryza sativa
MAPPPPPPTATKYFWGDSPEPDEYYASLGLRHAEAYFQSPCGRLFTHSFHPLSAASDGDVKGVVFMSHGYGSDSSWMFQNIAISYARWGYAVFCADLLGHGRSDGVRGYLGDTEAVARAALSFFLSVRRSGAYASLPAFLFGESMGGATTLLAYLRSPPDAGWAGIILSAPLLVFPDDMYPSRVRLFLYGLLFGLADTWAVMPDKRMVGRSIRDPAKLRVIASNPRLYRGSPRVGTMRELARVTALLRESFGEVAAPFLVVHGTDDGVTSPEGSRMLYERAASEDKSLILYDGMYHSLIQGESDENRDRVLADMRAWIDERVRRYGAGAGAAAADGHAEAPAA

SEQ ID NO: 1143 - DNA, 1179 bp, Oryza sativa
  CDS (1)..(1179)
atggcggggagcatgcaggccgcggaggcggcggggcggatcagcgcgctgctgtcgctgctcgcgctgcggcggctcatcgccttgctccagccgctcgccctgctcctgctcctgcccttccggtggcgcggcgcgcgccccggcgccgccgccgcggcggcggcggcggcggcggacgccgtggccgcctcggtcgcgtcgggcgggaagaaggggaaggccgccgtcgtgctgcgggtccccgccgggtcgccgatcgtcgccgcgaggcgccaggcgtcggcccgccgggagatcgccgcgcggcgggcgcgcgaggccggccgcgagtacgagctcatccccacccaccgcggcgagacgctgttcacgcagtgctggtggcctcacggatcctcctccgccattaagccgagggcgctcgtcgtagtcatgcacgggttgaacgagcacagtgggagatacgatcatctagctaggaggttgaacgacatcggtgttaaggtttatgggatggactggactggtcatggtggaagtgatggtcttcatggttacgtgcaatctcttgaccatgctgtcagtgacttgaaaatgtatctcaagaaaattttagctgaaaaccctggtcttccatgcttctgttttggccactcaactggtggaggcatcattttgaaggctatgcttgatccagaggtagattcttgtgttgagggcatcttcctgacatcaccagctgttcgtgttcagcctgcccatccaatcataaaggtcatggcccctgtgtttgccctcatagccccaagataccagttcacggcttcacacaggaacgggccaccggtatcacgtgacccggaagccctgaaggctaaatattcagaccagcttgtgttcaccggttccatccgagttagaacagggtacgagatcctacgcctgacgtcgtatttgcaacagcacttgcacagaatcactgtcccgatgctggtgatgcatggtgccgatgatatggtgaccgatccccaaggatcacagaaactgtacgaagaagcttcatcctcggacaagtccctcaatctgtacaacggtctgcttcatgatctgctcatcgagcccgagaaggagaagatcatggacaacattgtggattggctgagcccgaggatttga

SEQ ID NO: 1144 - protein, 392 aa, Oryza sativa
MAGSMQAAEAAGRISALLSLLALRRLIALLQPLALLLLLPFRWRGARPGAAAAAAAAAADAVAASVASGGKKGKAAVVLRVPAGSPIVAARRQASARREIAARRAREAGREYELIPTHRGETLFTQCWWPHGSSSAIKPRALVVVMHGLNEHSGRYDHLARRLNDIGVKVYGMDWTGHGGSDGLHGYVQSLDHAVSDLKMYLKKILAENPGLPCFCFGHSTGGGIILKAMLDPEVDSCVEGIFLTSPAVRVQPAHPIIKVMAPVFALIAPRYQFTASHRNGPPVSRDPEALKAKYSDQLVFTGSIRVRTGYEILRLTSYLQQHLHRITVPMLVMHGADDMVTDPQGSQKLYEEASSSDKSLNLYNGLLHDLLIEPEKEKIMDNIVDWLSPRI

SEQ ID NO: 1145 - DNA, 1056 bp, Oryza sativa
  CDS (1)..(1056)
atgacaaaggagatggccgatgatgtcgagtaccatgaggagtttgtgacgaatccgagggggttgcggctcttcacatgcggctggcttcctgcttcttcctcccccaaggcgctcatcttcctttgccatggctacggcatggaggtcagtggcttcatgaaagcatgtggggtcgagctggccacggcgggttacggcgtgttcggcatcgattatgaggggcatggcaagtccatgggtgccagatgctacatccagaagttcgagcatcttgtcgatgactgcgacagattcttcaaatcaatatgtgagctggaggagtacagagacaagagccggttcctgtacggggagtcgatgggcggcgcggttgcgctgctgctgcaccgcaaggacccaaccttctgggacggcgccgtcctcgtcgcgccgatgtgcaagatatcggagaaggtgaagccgcatccgttggtggtgacgctcctgacgcaggtggaggagatcatccccaagtggaagatcgtccccaccaaggacgtcatcgactctgccttcaaagaccccatcaagcgcgaaaagatcaggaagaacaagctgatctaccaggacaagcccaggctgaagacggcgctggagctgctgcgaaccagcatcagcgtcgagcaaagcttgtcacaggtgagcatcccgttcttcatcctgcacggcgaggccgacaaggtgacggacccggaggtgagccgtgcgctgtacgagcgcgccgccagcgccgacaagaccatcaagctctacccggggatgtggcacggcctcaccgccggcgagccggaccacaacgtccacctcgtcttctccgacatcgtcgcctggctcgaccgccgcagccaccgccaggacagggcgagcattaccccgccggcggcctgcaccgacagcgccgccgccgctgcggcggacagcccagtgtcgcctgagccgccgcggcaaggcgccgccggcggcttcctctgcggcctaaccggccgagcaaatccccagcaatgtaggatgtaa

SEQ ID NO: 1146 - protein, 351 aa, Oryza sativa
MTKEMADDVEYHEEFVTNPRGLRLFTCGWLPASSSPKALIFLCHGYGMEVSGFMKACGVELATAGYGVFGIDYEGHGKSMGARCYIQKFEHLVDDCDRFFKSICELEEYRDKSRFLYGESMGGAVALLLHRKDPTFWDGAVLVAPMCKISEKVKPHPLVVTLLTQVEEIIPKWKIVPTKDVIDSAFKDPIKREKIRKNKLIYQDKPRLKTALELLRTSISVEQSLSQVSIPFFILHGEADKVTDPEVSRALYERAASADKTIKLYPGMWHGLTAGEPDHNVHLVFSDIVAWLDRRSHRQDRASITPPAACTDSAAAAAADSPVSPEPPRQGAAGGFLCGLTGRANPQQCRM

SEQ ID NO: 1147 - DNA, 1194 bp, Oryza sativa
  CDS (1)..(1194)
atgtgggcccccacggcctcgccggcggctgcggcggggagggcggcgatcccgtcgctccggcggtggccggcggcggccgcgggggtgcggatcgtcgtcgcggtggctcctgtcaaggcgagggcgccgcggcggctgcggctctgcctcgcggtgccgccgcccgcgtccgagatggccgcggcggcggcggcggcggaggaggaggaggaggaggaggaggaggaggaggggtggagcaaggcggtggagctggacgcggcggcgaggcgggagatggcgatccggaggctgcaggaggaggcggggacggggagcagcaggagggagttcgccgtgttcgagacggccaggggggacgctctcttcacgcagtcgtggaccccggtcgccgccgccgatcgcgtcaagggcatcgttgttctgttacatggactaaatgagcatagtgggaggtacaaccattttgcaaagctgttaaatgatcatgggcttaaagtttatgcaatggactggattggacatggtggaagtgatggggtgcatggctatgtttcatcgcttgatcatgctgttggtgacctgaaagaatttctagaggatgttgtactggaggaaaactatggtttgccatgtttcttatttggccactccacaggtggagctattgttttgaaggcagtcctggatccttgtgttgaagttcatgttgaaggtgtgatcttgacatctccggctattcatgttcaaccatctcatccaattatcaaagttgttgcacctatcttctctgtgttagctccaaaataccgagttgctgctttgcacaggagaggacctcctgtttcccgtgatcctgaggctttgaagatcaagtatgcagatccacttgtgtatactggacccattagagttagaactggcaatgaaattcttcggatatcatcatatttgcaaagaaacttaagcagagtaactgtcccttttttagttctgcatggcacagctgacacaataactgaccccggagcatctcaacgactgtaccaatcatcagcatcagcacataaatctataaaactgtatgatggatatttacatgatcttctctttgaacctgaaagggatgatatagcaaatgacatcatcaattggttaagctcaagacttgatgttctccagagatggtga

SEQ ID NO: 1148 - protein, 397 aa, Oryza sativa
MWAPTASPAAAAGRAAIPSLRRWPAAAAGVRIVVAVAPVKARAPRRLRLCLAVPPPASEMAAAAAAAEEEEEEEEEEEGWSKAVELDAAARREMAIRRLQEEAGTGSSRREFAVFETARGDALFTQSWTPVAAADRVKGIVVLLHGLNEHSGRYNHFAKLLNDHGLKVYAMDWIGHGGSDGVHGYVSSLDHAVGDLKEFLEDVVLEENYGLPCFLFGHSTGGAIVLKAVLDPCVEVHVEGVILTSPAIHVQPSHPIIKVVAPIFSVLAPKYRVAALHRRGPPVSRDPEALKIKYADPLVYTGPIRVRTGNEILRISSYLQRNLSRVTVPFLVLHGTADTITDPGASQRLYQSSASAHKSIKLYDGYLHDLLFEPERDDIANDIINWLSSRLDVLQRW

SEQ ID NO: 1149 - DNA, 891 bp, Oryza sativa
  CDS (1)..(891)
atggcagatgatggtttcaaatatcatgaggaatatgttacaaataaacgagggatgaagctctttgcatgccaatggagtcctttagaccatgaaccgaaagctctaatcttcctatgccatggatatgccatggaatgcagcatttcaatgagaggaacaggtgttcggttggcaaaggctggatttacagtgcacggattggactatcagggccatgggaagtccgaaggacttcaaggctatatcaatagttttgatgatgttgttgttgattgctcgaactactttgcaagtgtttgtgaaagaggagagtgcaaaggaaaaaagaagttccttcttggtgagtcaatgggaggcgctattgtgctgatgctacataggaaggaacctacaaattgggatggggctattttggttgcccccatgtgcaagattgtagaagatatgaagcctcgtcccattgtgataacaatcctaagcaagcttagcaacgtgatacctacatggaaaattattcctactgaagatgtcattgataaggcaattaaaagcgaggagtggcgtcaagaggtaagaaacaatccatattgctataaaggaaggcctaggttaaagactggttatgaactttttatggcaagcttggatattgaaagcactcttgacaaggttacactaccattcatcattgtccatggtggtgatgatgccgtcacagatccatcagtaagtgaagaactgtatacatcagctcagagcaaggacaaaacactgaaactgtacccagggatgtgtcacgccctgacatctggtgagcccgcaagcaacattgacattgtatttttggacatcattaagtggcttgatgagagggtatcagtttcataa

SEQ ID NO: 1150 - protein, 296 aa, Oryza sativa
MADDGFKYHEEYVTNKRGMKLFACQWSPLDHEPKALIFLCHGYAMECSISMRGTGVRLAKAGFTVHGLDYQGHGKSEGLQGYINSFDDVVVDCSNYFASVCERGECKGKKKFLLGESMGGAIVLMLHRKEPTNWDGAILVAPMCKIVEDMKPRPIVITILSKLSNVIPTWKIIPTEDVIDKAIKSEEWRQEVRNNPYCYKGRPRLKTGYELFMASLDIESTLDKVTLPFIIVHGGDDAVTDPSVSEELYTSAQSKDKTLKLYPGMCHALTSGEPASNIDIVFLDIIKWLDERVSVS

SEQ ID NO: 1151 - DNA, 942 bp, Saccharomyces cerevisiae
  CDS (1)..(942)
atggctccgtatccatacaaagtgcagacgacagtacctgaacttcaatacgaaaactttgatggtgctaagttcgggtacatgttctggcctgttcaaaatggcaccaatgaggtcagaggtagagttttactgattcatgggtttggcgagtacacaaagattcaattccggcttatggaccacttatcactcaatggttacgagtcatttacgtttgatcaaaggggtgctggtgttacatcgccgggcagatcgaaaggtgtaactgatgagtaccatgtgtttaacgatcttgagcattttgtggagaagaacttgagtgaatgtaaggccaaaggcatacccttgttcatgtgggggcattcaatgggcggtggtatctgcctaaactatgcctgccaaggtaagcacaaaaacgaaataagcggatatatcgggtcaggcccattaataattttacatccgcatacaatgtataacaagccgacccaaattattgctccattattggcgaaatttttaccaagggtaaggatcgacactggtttagatcttaaaggaatcacatctgataaagcctatcgtgctttcctcggaagcgatcctatgtctgttccactatatgggtcgtttaggcaaatacacgactttatgcaacgtggtgccaagctctacaagaatgaaaacaattatattcagaagaacttcgctaaagacaaacccgttattattatgcatggacaagacgacacaatcaacgatcctaagggctctgaaaagttcattcaggactgtccttctgctgacaaagaattaaagctgtatccgggcgcaagacattcgattttctcactagagacagataaagtcttcaacacggtgttcaatgatatgaagcaatggttggacaaacacaccacgaccgaagctaaaccataa

SEQ ID NO: 1152 - protein, 313 aa, Saccharomyces cerevisiae
MAPYPYKVQTTVPELQYENFDGAKFGYMFWPVQNGTNEVRGRVLLIHGFGEYTKIQFRLMDHLSLNGYESFTFDQRGAGVTSPGRSKGVTDEYHVFNDLEHFVEKNLSECKAKGIPLFMWGHSMGGGICLNYACQGKHKNEISGYIGSGPLIILHPHTMYNKPTQIIAPLLAKFLPRVRIDTGLDLKGITSDKAYRAFLGSDPMSVPLYGSFRQIHDFMQRGAKLYKNENNYIQKNFAKDKPVIIMHGQDDTINDPKGSEKFIQDCPSADKELKLYPGARHSIFSLETDKVFNTVFNDMKQWLDKHTTTEAKP

SEQ ID NO: 1153 - DNA, 24 bp, Artificial sequence
  primer
atggctccgtatccatacaaagtg

SEQ ID NO: 1154 - DNA, 24 bp, Artificial sequence
  primer
ttatggtttagcttcggtcgtggt

SEQ ID NO: 1155 - protein, 311 aa, Artificial sequence
  consensus sequence
  Variant (2)..(4): Xaa in position 2 to 4 is any amino acid
  Variant (6)..(6): Xaa in position 6 is any amino acid
  Variant (8)..(18): Xaa in position 8 to 18 is any amino acid
  Variant (19)..(37): Xaa in position 19 to 37 is any or no amino acid
  Variant (40)..(55): Xaa in position 40 to 55 is any amino acid
  Variant (56)..(58): Xaa in position 56 to 58 is any or no amino acid
  Variant (60)..(61): Xaa in position 60 to 61 is any amino acid
  Variant (63)..(65): Xaa in position 63 to 65 is any amino acid
  Variant (67)..(68): Xaa in position 67 to 68 is any amino acid
  Variant (70)..(70): Xaa in position 70 is any amino acid
  Variant (72)..(72): Xaa in position 72 is any amino acid
  Variant (73)..(73): Xaa in position 73 is any or no amino acid
  Variant (75)..(75): Xaa in position 75 is any amino acid
  Variant (77)..(89): Xaa in position 77 to 89 is any amino acid
  Variant (90)..(92): Xaa in position 90 to 92 is any or no amino acid
  Variant (94)..(108): Xaa in position 94 to 108 is any amino acid
  Variant (109)..(118): Xaa in position 109 to 118 is any or no amino acid
  Variant (120)..(121): Xaa in position 120 to 121 is any amino acid
  Variant (123)..(123): Xaa in position 123 is any amino acid
  Variant (125)..(125): Xaa in position 125 is any amino acid
  Variant (128)..(130): Xaa in position 128 to 130 is any amino acid
  Variant (132)..(156): Xaa in position 132 to 156 is any amino acid
  Variant (157)..(164): Xaa in position 157 to 164 is any or no amino acid
  Variant (166)..(215): Xaa in position 166 to 215 is any amino acid
  Variant (216)..(220): Xaa in position 216 to 220 is any or no amino acid
  Variant (222)..(223): Xaa in position 222 to 223 is any amino acid
  Variant (225)..(225): Xaa in position 225 is any amino acid
  Variant (227)..(241): Xaa in position 227 to 241 is any amino acid
  Variant (242)..(248): Xaa in position 242 to 248 is any or no amino acid
  Variant (250)..(253): Xaa in position 250 to 253 is any amino acid
  Variant (256)..(257): Xaa in position 256 to 257 is any amino acid
  Variant (259)..(261): Xaa in position 259 to 261 is any amino acid
  Variant (264)..(265): Xaa in position 264 to 265 is any amino acid
  Variant (267)..(268): Xaa in position 267 to 268 is any amino acid
  Variant (270)..(274): Xaa in position 270 to 274 is any amino acid
  Variant (275)..(276): Xaa in position 275 to 276 is any or no amino acid
  Variant (278)..(278): Xaa in position 278 is any amino acid
  Variant (281)..(284): Xaa in position 281 to 284 is any amino acid
  Variant (286)..(289): Xaa in position 286 to 289 is any amino acid
  Variant (291)..(303): Xaa in position 291 to 303 is any amino acid
  Variant (304)..(306): Xaa in position 304 to 306 is any or no amino acid
  Variant (308)..(310): Xaa in position 308 to 310 is any amino acid
FXXXWXPXXXXXXXXXXXXXXXXXXXXXXXXXXXXXXHGXXXXXXXXXXXXXXXXXXXGXXVXXXDXXGXGXXSXGXXXXXXXXXXXXXXXXDXXXXXXXXXXXXXXXXXXXXXXXXXFXXGXSXGGXXXLXXXXXXXXXXXXXXXXXXXXXXXXXXXXXXXXXPXXXXXXXXXXXXXXXXXXXXXXXXXXXXXXXXXXXXXXXXXXXXXXXXXXXXXXXTXXEXLXXXXXXXXXXXXXXXXXXXXXXPXXXXHGXXDXXXDPXXSXXLXXXXXXXSXDKXXXXYXXXXHXXXXXXXXXXXXXXXXDXXXW

SEQ ID NO: 1156 - protein, 13 aa, Artificial sequence
  protein pattern
  Variant (2)..(3): Xaa in position 2 to 3 is any amino acid
  Variant (5)..(5): Xaa in position 5 is any amino acid
  Variant (7)..(7): Xaa in position 7 is any amino acid
  Variant (10)..(10): Xaa in position 10 is Ala, Gly or Leu
  Variant (11)..(12): Xaa in position 11 to 12 is any amino acid
FXXGXSXGGXXXL

SEQ ID NO: 1157 - DNA, 1650 bp, Saccharomyces cerevisiae
  CDS (1)..(1650)
atgtccccttctaaaatgaatgctacagtaggatctacttccgaagttgaacaaaaaatcagacaagaattggctcttagtgacgaagtcaccaccatcagacgcaatgctccagctgccgttttgtatgaagatggtctaaaagaaaataaaactgtcatttcatcaagcggtgcattgatcgcttattccggtgttaaaaccggaagatctccaaaggacaaacgtattgttgaagaacctacctcgaaagacgaaatttggtggggtccggtcaataaaccatgttctgaaagaacatggtctatcaaccgtgaaagagctgcagattacttgagaacaagagaccacatttatattgtcgatgcatttgcaggatgggatccaaaatacagaatcaaagtccgcgttgtttgtgccagggcttaccacgctttattcatgacaaatatgcttattagacctacagaagaagaattagcccattttggagaacctgattttactgtctggaacgctggtcagttcccagccaatttacacacccaggatatgtcttcaaagagtactatagaaattaacttcaaagcaatggaaatgatcattttaggtaccgaatacgccggtgaaatgaaaaaaggtattttcacagttatgttttacttgatgcctgtgcaccataacgttttaactttgcactcttccgccaaccagggtattcaaaacggtgacgttactttattctttggcctaagtggtaccgggaaaaccactttatccgcagacccacatagattgttgatcggcgatgatgaacattgttggtccgaccatggtgtcttcaatatcgaaggtggttgttacgccaagtgtattaatttatctgccgaaaaggagcctgaaattttcgacgctatcaagtttggttctgtattagaaaacgttatctatgacgagaagtcgcatgtagtcgactatgacgactcttctattactgaaaatactagatgtgcctacccaattgactacattccaagtgccaagattccatgtttggcggactctcatccaaagaacattatcctgctaacttgtgatgcttcgggtgttttaccaccagtatctaaattgactcctgaacaagtcatgtaccatttcatctctggttacacttctaaaatggctggtactgagcaaggtgtcactgaacctgaaccaacattttcatcttgtttcggacaacccttcctagccttgcaccctattagatacgcaaccatgttagctacaaagatgtctcaacataaagctaatgcgtacttaatcaacaccggctggactggttcttcctacgtatctggtggtaaacgttgcccattgaagtacacaagggccattctggattctattcatgatggttcgttagccaatgaaacgtacgaaactttaccgattttcaatcttcaagtacctaccaaggttaacggtgttccagctgagcttttgaatcctgctaaaaactggtctcaaggtgaatccaaatacagaggtgcagttaccaacttggccaacttgtttgttcaaaatttcaagatttatcaagacagagccacaccagatgtattagccgctggtcctcaattcgagtaa

SEQ ID NO: 1158 - protein, 549 aa, Saccharomyces cerevisiae
MSPSKMNATVGSTSEVEQKIRQELALSDEVTTIRRNAPAAVLYEDGLKENKTVISSSGALIAYSGVKTGRSPKDKRIVEEPTSKDEIWWGPVNKPCSERTWSINRERAADYLRTRDHIYIVDAFAGWDPKYRIKVRVVCARAYHALFMTNMLIRPTEEELAHFGEPDFTVWNAGQFPANLHTQDMSSKSTIEINFKAMEMIILGTEYAGEMKKGIFTVMFYLMPVHHNVLTLHSSANQGIQNGDVTLFFGLSGTGKTTLSADPHRLLIGDDEHCWSDHGVFNIEGGCYAKCINLSAEKEPEIFDAIKFGSVLENVIYDEKSHVVDYDDSSITENTRCAYPIDYIPSAKIPCLADSHPKNIILLTCDASGVLPPVSKLTPEQVMYHFISGYTSKMAGTEQGVTEPEPTFSSCFGQPFLALHPIRYATMLATKMSQHKANAYLINTGWTGSSYVSGGKRCPLKYTRAILDSIHDGSLANETYETLPIFNLQVPTKVNGVPAELLNPAKNWSQGESKYRGAVTNLANLFVQNFKIYQDRATPDVLAAGPQFE

SEQ ID NO: 1159 - DNA, 1992 bp, Oryza sativa (japonica cultivar-group)
  CDS (1)..(1992)
atggcgagcacgccgaacgggctggcgcggatcgagacgcacggggcgaagacgaagaagcacgagaacgggatatgccacgacgacagctcggcgccggtgcgggcgcagaccatcgacgagctccactcgctgcagcggaagcggtcggcgcccaccacgcccatcaaggacggcgcctcctcgcccttcgccgccgccctctccgaggaggagcgccagcgccagcagctccagtccatcagcgcgtcgttggcgtcgctgacgcgtgagaccgggccgaaggtcgtcaggggagatccggcgaggaagggcgaggccgcggcgaagggcgcgccgtcgccgcacccgcagccggtgcaccaccaccacccgcacgtcaccccgaccatcgccgtcagcgacagctccctcaagttcacccatgtgctctacaacctctcgcctgctgagctgtacgagcaggcgatcaagtacgagaaggggtcgttcatcacgtccaccggcgcgctggcgacgctgtccggcgccaagaccggccggtcgccgagggacaagcgcatcgtcaaggatgaggcctccgcgcaggagctttggtggggcaagggttcgcccaacatcgagatggacgagcacactttcctcaccaacagggagagggccgtcgactacctcaactcccttgacaaggtgtttgtgaacgaccagttcctgaactgggacacggagaaccggatcaaagtccgtatcatctcggccagggcgtaccactcgctcttcatgcacaacatgtgcatccggccgacggaggaggagctggaggagttcggcacgccggacttcaccatatacaacgccgggcagttcccctgcaaccggtacacgcactacatgacgtcgtcgacgagcgtagacatcaacctcgctaggagggagatggtgatcctcggcacgcagtacgccggggagatgaagaaggggctcttcggggtgatgcactacctcatgcccaggaggggcatcctctccctgcactccggctgcaacatgggcaagcagggcgacgtcgccctcttctttggactgtcaggtactggaaagactactctgtcaactgaccacaacaggctgctgatcggcgacgatgagcactgctggagtgacactggcgtgtccaacatcgagggtggttgctatgccaagtgcatagacttgtcacaggagaaagagcctgatatttggaatgccatcaagtttgggaccgtgttggagaatgtcgtctttgatgagcacacccgtgaagttgattacaccgacaaatctgtcaccgagaacacgcgcgctgcttaccctatcgagtacatccccaacgccaagataccgtgcgtcgggccacacccgaagaacgtcattctcctggcatgcgacgctttcggcgtcctccctcctgtcagcaagctaaaccttccacagaccatgtaccacttcatcagtggctacactgctctggttgccggcacggaggatggcatcaaggagccgcaggctacgttctctgcttgcttcggtgcagcgttcatcatgctccacccgaccaagtacgccgccatgctcgccgagaagatgcagaagtatggcgccaccgggtggctcgtcaacaccggttggtccggtggaaggtacggagttggcaagcggatcaggctgccgtataccaggaagatcatcgacgccatccactccggtgagctcctcaccgccaactacaagaagacggaggtgtttggcctggagatccccactgaaatcgacggcatcccgtctgaaatcctcgacccgatcaacacctggacggacaagggcgcgtacaaggagacgctcctgaagctggctggcctgttcaagaagaacttcgaggtgttcgccaactacaagatcgggggagacagcagcctgacagacaagatcctcgctgctggaccaaacttttga

SEQ ID NO: 1160 - protein, 663 aa, Oryza sativa (japonica cultivar-group)
MASTPNGLARIETHGAKTKKHENGICHDDSSAPVRAQTIDELHSLQRKRSAPTTPIKDGASSPFAAALSEEERQRQQLQSISASLASLTRETGPKVVRGDPARKGEAAAKGAPSPHPQPVHHHHPHVTPTIAVSDSSLKFTHVLYNLSPAELYEQAIKYEKGSFITSTGALATLSGAKTGRSPRDKRIVKDEASAQELWWGKGSPNIEMDEHTFLTNRERAVDYLNSLDKVFVNDQFLNWDTENRIKVRIISARAYHSLFMHNMCIRPTEEELEEFGTPDFTIYNAGQFPCNRYTHYMTSSTSVDINLARREMVILGTQYAGEMKKGLFGVMHYLMPRRGILSLHSGCNMGKQGDVALFFGLSGTGKTTLSTDHNRLLIGDDEHCWSDTGVSNIEGGCYAKCIDLSQEKEPDIWNAIKFGTVLENVVFDEHTREVDYTDKSVTENTRAAYPIEYIPNAKIPCVGPHPKNVILLACDAFGVLPPVSKLNLPQTMYHFISGYTALVAGTEDGIKEPQATFSACFGAAFIMLHPTKYAAMLAEKMQKYGATGWLVNTGWSGGRYGVGKRIRLPYTRKIIDAIHSGELLTANYKKTEVFGLEIPTEIDGIPSEILDPINTWTDKGAYKETLLKLAGLFKKNFEVFANYKIGGDSSLTDKILAAGPNF

SEQ ID NO: 1161 - DNA, 1914 bp, Oryza sativa (japonica cultivar-group)
  CDS (1)..(1914)
atgatggaggcgaaagacgggcaagcatggctggggacgaacggatacggcagcaggagggaggaagacggcgtgtgccacgacgacagcgcgacaccggtgagggcgaacactgtcgacgagctacactcgctgcagaggaagcctcaggtagtggaggatcgccacaggctgcagcttcagtccatcagtgcgtctttggcatcgatgacatgtgggattgggccaaaactcgtcaacggtgacccagcaaggaaaaaagaaatggctggcaaggctgtgacacatcaccaacaccatatcactgtccccacgatcactgtgagcgacagtgacctcaagttcacccatgttctgtacaacttatccccttctgaactttatgagcatgcaatcaaatatgagaaagggtcattcatcacatccagtggggcgttagcgacgctatcaggagcaaagaccggtcgatcacctagggacaagcgtgttgtcaaggatgaaacaacagatgatctgtggtggggcaagggatcaccaaacattgaaatggacgagcaaacctttctgatcaacagggagagagctgttgactacttgaactcccttgataaggtgtttgttaatgatcagttcctaaactgggaccccaacaataggataaaagttcgaatcatctctgcgagggcctaccattctctcttcatgcacaacatgtgcatccggccaacatacgaggaactagagaattttggcgagcccgacttcaccatctacaatgctggacagttcccgtgcaaccgttacacgcattacatgacatcgtcaactagcatagacttaaatcttaagcggagagaaatggtcatcctgggaacacaatatgctggagagatgaagaaaggcctcttcagtgtgatgcactacctcatgcccaaaaagcagatcctctcgttgcactctggctgcaacatgggcagagggggtgatgtagccctgttttttggattgtcaggtactggaaagacaactctgtcaacagacaggaataggatcttaattggtgatgatgaacactgctggagtgataatggtatctctaacattgagggcggctgctatgctaaatgcatagatctttctcaggagaaagaacctgacatttgggatgcaatcaagtttggcacagtgttggagaatgttgttttcgatgagcactcccgtgaagttgattatacagaaaaatctgtcacagagaatacccgtgctgcttaccctattgaatacatagctaatgctaagataccatgtgttgggccacacccaaagaatgttatcctacttgcatgtgatgcatttggtgtcctccctcctgtcagcaagttgagccatgcacaaaccatgtaccattttatcagtggctacactgcattggtcgctggaactgaagatggtatcaaggagccacaggctacattttctgcctgctttggtgcagcttttataatgctccacccaactcggtacgctgccatgctggcagataagatgaacaagcatggagctaccggatggcttgtcaacactggttggatcgggggaagttatggtgtaggtgagcgaatcagcttggcctacacaaggaaaatcatcgatgccattcactcgggtgagcttttggctagaagctacaaaaagacagatgtctttggactagacatccccacaaaagtggaaggagttccatctgaattgcttgacccaataaatacctgggaagacaaagactcatacaagttgacacttctaaagctgtcagatctgttcaagagaaatttcaaggtatttgcaaattacaagaaaggtggtgttagtgatctggctgatgagattgctgctgcaggaccaaatttctga

SEQ ID NO: 1162 - protein, 637 aa, Oryza sativa (japonica cultivar-group)
MMEAKDGQAWLGTNGYGSRREEDGVCHDDSATPVRANTVDELHSLQRKPQVVEDRHRLQLQSISASLASMTCGIGPKLVNGDPARKKEMAGKAVTHHQHHITVPTITVSDSDLKFTHVLYNLSPSELYEHAIKYEKGSFITSSGALATLSGAKTGRSPRDKRVVKDETTDDLWWGKGSPNIEMDEQTFLINRERAVDYLNSLDKVFVNDQFLNWDPNNRIKVRIISARAYHSLFMHNMCIRPTYEELENFGEPDFTIYNAGQFPCNRYTHYMTSSTSIDLNLKRREMVILGTQYAGEMKKGLFSVMHYLMPKKQILSLHSGCNMGRGGDVALFFGLSGTGKTTLSTDRNRILIGDDEHCWSDNGISNIEGGCYAKCIDLSQEKEPDIWDAIKFGTVLENVVFDEHSREVDYTEKSVTENTRAAYPIEYIANAKIPCVGPHPKNVILLACDAFGVLPPVSKLSHAQTMYHFISGYTALVAGTEDGIKEPQATFSACFGAAFIMLHPTRYAAMLADKMNKHGATGWLVNTGWIGGSYGVGERISLAYTRKIIDAIHSGELLARSYKKTDVFGLDIPTKVEGVPSELLDPINTWEDKDSYKLTLLKLSDLFKRNFKVFANYKKGGVSDLADEIAAAGPNF

SEQ ID NO: 1163 - DNA, 1623 bp, Escherichia coli O157:H7 EDL933
  CDS (1)..(1623): transl_table=11
  misc_feature (808)..(808): k is g or t
atgcgcgttaacaatggtttgaccccgcaagaactcgaggcttatggtatcagtgacgtacatgatatcgtttacaacccaagctacgacctgctgtatcaggaagagctcgatccgagcctgacaggttatgagcgcggggtgttaactaatctgggtgccgttgccgtcgataccgggatcttcaccggtcgttcaccaaaagataagtatatcgtccgtgacgataccactcgcgatactttctggtgggcagacaaaggcaaaggtaagaacgataacaaacctctctctccggaaacctggcaacatctgaaaggcctggtgaccaaacagctttccggcaaacgtctgttcgttgtcgacgccttctgtggtgcgaacccggatactcgtctttccgtccgtttcatcaccgaagtggcctggcaggcgcattttgtcaaaaacatgtttattcgcccgagcgatgaagagttggcaggtttcaaaccagactttatcgttatgaacggcgcgaagtgcactaacccgcagtggaaagaacagggtctgaattccgaaaacttcgtggcttttaacctgaccgagcgcatgcagctgattggcggcacctggtatggcggcgaaatgaagaaagggatgttctcgatgatgaactacctgctgccgctgaaaggtatcgcttctatgcactgctccgccaacgttagcgagaaaggcgatgttgcggtgttcttcggcctttccggcaccggtaaaaccaccctttccaccgacccgaaacgtcgcctgattggcgatgackaacacggctgggacgatgacggcgtgtttaacttcgaaggcggctgctacgcaaaaactatcaagctgtcgaaagaagcggaacctgaaatctacaacgctatccgtcgcgatgcgctgctggaaaacgtcaccgtgcgtgaagatggcactatcgactttgatgatggttcaaaaaccgagaacacccgcgtttcttatccgatctatcacatcgataacatcgttaagccggtttcaaaagcgggtcacgcaacgaaagttatcttcctgaccgcagacgcctttggtgtgctgccaccggtttctcgtctgactgccgatcaaacccagtaccacttcctctctggcttcaccgccaaactggccggtactgagcgtggcatcaccgaaccgacgccaaccttctccgcttgcttcggcgcggcattcctgtcgctgcacccgactcagtacgcagaagtgctggtgaaacgtatgcaggcggcgggcgcgcaggcttatctggttaacactggctggaacggcactggcaaacgtatctcgattaaagatacccgcgccattatcgacgccatcctcaacggttcgctggataatgcagaaaccttcactctgccgatgtttaacctggcgatcccaaccgaactgccgggcgtagacacgaagattctcgatccgcgtaacacctacgcttccccggaacagtggcaggaaaaagccgaaaccctggcgaaactgtttatcgacaactttgataaatacaccgacacccctgcgggtgccgcgctggtagcggctggtccgaaactgtaa

SEQ ID NO: 1164 - protein, 540 aa, Escherichia coli O157:H7 EDL933
  misc_feature (270)..(270): The Xaa at location 270 stands for Stop, or Glu.
MRVNNGLTPQELEAYGISDVHDIVYNPSYDLLYQEELDPSLTGYERGVLTNLGAVAVDTGIFTGRSPKDKYIVRDDTTRDTFWWADKGKGKNDNKPLSPETWQHLKGLVTKQLSGKRLFVVDAFCGANPDTRLSVRFITEVAWQAHFVKNMFIRPSDEELAGFKPDFIVMNGAKCTNPQWKEQGLNSENFVAFNLTERMQLIGGTWYGGEMKKGMFSMMNYLLPLKGIASMHCSANVSEKGDVAVFFGLSGTGKTTLSTDPKRRLIGDDXHGWDDDGVFNFEGGCYAKTIKLSKEAEPEIYNAIRRDALLENVTVREDGTIDFDDGSKTENTRVSYPIYHIDNIVKPVSKAGHATKVIFLTADAFGVLPPVSRLTADQTQYHFLSGFTAKLAGTERGITEPTPTFSACFGAAFLSLHPTQYAEVLVKRMQAAGAQAYLVNTGWNGTGKRISIKDTRAIIDAILNGSLDNAETFTLPMFNLAIPTELPGVDTKILDPRNTYASPEQWQEKAETLAKLFIDNFDKYTDTPAGAALVAAGPKL

SEQ ID NO: 1165 - DNA, 1686 bp, Agrobacterium tumefaciens str. C58
  CDS (1)..(1686): transl_table=11
ttgcgtttccaaaagctggcacgtattttccgtgaagatttcaacggccttatcgtcatttacaaggaacgcgtcatgaacgagcttggggttcataatcctgccaatggagttgcggaactcggactgggcgaggcctcccgcgtcttttataacctcaatgagagcgaattatacgaacacgcgatccgtaacggcgaagccgaactgaccatcgacggcgcgctgcgcgccgtcaccggccagcatacgggccgctcgccgaaggataaattcgtcgttcgtgatgcttccaccgaaaacaccatctggtgggacaacaacaagccgctgtcgccggaaaatttcgagctgctgcgtcaggacatgctggcccatgccgccggcaagacgctttacgtgcaggatctgatcggcggtgccgatgaggaaaatgcgctgccgacccgcgtcgtcaccgagcttgcctggcattcgctgttcatccgcaatctactgatccggccgaagcgggagacgctttcgggcttcagccagaagctcaccatcatcaacctgccaagcttcaaggctgatccggcccgtcatggcgttcgctcggaaacggtcattgcctgcgatctgacgaatggcctcgtgctcatcggcggcacgtcctatgccggtgaaaacaagaagtcggtcttcacggtgctgaactacctgctgccggccaagggcgtgatgccgatgcattgctcggccaatgtcggtcctgagggtgattccgccgtgttcttcggcctctccggcaccggcaagaccacgctctccgccgacccggcacgcacgctgatcggcgatgacgaacatggctggggcgaacacggcatcttcaacttcgagggcggctgttatgccaaggcgatcaagctttcgtccgaggccgagccggaaatctacgccgcgaccaatcgtttcggcacggttctcgaaaacgtcgtgctggatgaaagccgggttcctgatttcaacgacaactcgctgacggaaaacacccgcagcgcctatccgctgcacttcattccgaatgcatcggaaacgggcattgccggccatccgaagacgatcatcatgctgacggcggatgccttcggcgtgctgccgccgatcgcgcgtctgacgccggaacaggccatgtaccacttcctctccggttacaccgccaaggttgccggcacggaaaagggcgtgaccgagccggaagccacattctccacctgcttcggcgcacccttcatgccgcgtcatccggcggaatacggcaacctgctgcgtgagctgatcggcaagcacggcgtcgattgctggctggtcaataccggctggaccggcggcgcctatggcatcggcaagcgtatgcccatcaaggcgacgcgcgcgcttctgaccgccgcacttaccggcgacctgaagaatgcgcaattccgcaccgatgcgaatttcggtttcgccgtaccgctgtcgctcgacggcgtcgatggtgcgatccttgatccacgttccacctgggccgatggcgcagcttacgacgcgcaggcgaagaagctggtatcgatgttcgtttcgaacttcaccaagttcgaagatcacgtcgacagcaaggttcgcgacgcagccccgggccttctgctcgcggctgaatga

SEQ ID NO: 1166 - protein, 561 aa, Agrobacterium tumefaciens str. C58
MRFQKLARIFREDFNGLIVIYKERVMNELGVHNPANGVAELGLGEASRVFYNLNESELYEHAIRNGEAELTIDGALRAVTGQHTGRSPKDKFVVRDASTENTIWWDNNKPLSPENFELLRQDMLAHAAGKTLYVQDLIGGADEENALPTRVVTELAWHSLFIRNLLIRPKRETLSGFSQKLTIINLPSFKADPARHGVRSETVIACDLTNGLVLIGGTSYAGENKKSVFTVLNYLLPAKGVMPMHCSANVGPEGDSAVFFGLSGTGKTTLSADPARTLIGDDEHGWGEHGIFNFEGGCYAKAIKLSSEAEPEIYAATNRFGTVLENVVLDESRVPDFNDNSLTENTRSAYPLHFIPNASETGIAGHPKTIIMLTADAFGVLPPIARLTPEQAMYHFLSGYTAKVAGTEKGVTEPEATFSTCFGAPFMPRHPAEYGNLLRELIGKHGVDCWLVNTGWTGGAYGIGKRMPIKATRALLTAALTGDLKNAQFRTDANFGFAVPLSLDGVDGAILDPRSTWADGAAYDAQAKKLVSMFVSNFTKFEDHVDSKVRDAAPGLLLAAE

SEQ ID NO: 1167 - DNA, 1584 bp, Fusobacterium nucleatum subsp. nucleatum ATCC 25586
  CDS (1)..(1584): transl_table=11
atgaaaatgtatggacttgaaaaattaggaattaataatgtaacagcagctcactataatttaagccctgcacagcttgtagaaaaagctttggcaaataatgaaggaatattaagtgatactggtgcctttgttatatcaactggtaaatatactggtcgtgcaccagatgataaattttttgtagacactccagaagttcataagtatattgattggagtagaaatcaacctattgaaaaagaaaaatttgatgcaatttttggaaaattagttgcttatttacaaaatcgtgaaatttttatttttgatggaagagcaggagctaatcctgaatacacaagaagattccgtgttataaatgaattagctagtcaaaacttatttattcatcaactattaattaggacagatgaagaatacaatgaaaataatgatattgactttactattatttcagcacctaattttcactgtgtacctgaaatagatggagttaattcagaagcagcgattattattaattttgaaaaaaagatagctattatctgtgctacaaaatattctggtgaaatcaaaaaaagtgtattttctataatgaactatatcatgcctcatgaaaacattttacctatgcactgctcagcaaatatggatccagtaactcatgaaactgcaattttctttggattatctggaacaggaaaaacaactctatcagccgatcctaatcgtaagttgattggtgatgatgaacatggttggtgtgataaaggtattttcaattttgaaggtggatgttatgcaaaatgtataaacttaaaagaagaaagtgaacctgaaatttatcgtgcaattaaatttggaagtttagtcgaaaatgttgttgtagaccccataacaagaaaaattcaatatgaagatgcaagtataactccaaatacaagagtaggatatcctatagactatattcctaatgctgaattatcaggagtaggtggaataccaaaagttgttatattcttaacagcagattcttttggagtattgcctccaatttcaagactaagccaagaagctgcaatgtaccattttgtaaccggatttactgcaaagttagcaggaacagaattaggggtaaaagaaccagttcctacattctcaacatgttttggagaaccatttatgcctatggatccaagtgtgtatgctgagatgcttggagaaagattaaagaaacataatacaaaagtgtatttaatcaacactggttggtcaggtggagcttatggaacaggtaagagaataaatttaaaatatactcgtgctatggtaacagcagtattaaatggatattttgataatgctgaatacaaacatgatgacatatttaacttagatattcctcaatcttgcccaggtgttcctagtgaaattatgaatccaatcgatacttggcaagatagagataaatatattatagctgctaaaaaattggctaatctattctataataactttaaagaaaaatatccaaatatgccagaaaatattacaaatgctggccctaaatataatgattaa

SEQ ID NO: 1168 - protein, 527 aa, Fusobacterium nucleatum subsp. nucleatum ATCC 25586
MKMYGLEKLGINNVTAAHYNLSPAQLVEKALANNEGILSDTGAFVISTGKYTGRAPDDKFFVDTPEVHKYIDWSRNQPIEKEKFDAIFGKLVAYLQNREIFIFDGRAGANPEYTRRFRVINELASQNLFIHQLLIRTDEEYNENNDIDFTIISAPNFHCVPEIDGVNSEAAIIINFEKKIAIICATKYSGEIKKSVFSIMNYIMPHENILPMHCSANMDPVTHETAIFFGLSGTGKTTLSADPNRKLIGDDEHGWCDKGIFNFEGGCYAKCINLKEESEPEIYRAIKFGSLVENVVVDPITRKIQYEDASITPNTRVGYPIDYIPNAELSGVGGIPKVVIFLTADSFGVLPPISRLSQEAAMYHFVTGFTAKLAGTELGVKEPVPTFSTCFGEPFMPMDPSVYAEMLGERLKKHNTKVYLINTGWSGGAYGTGKRINLKYTRAMVTAVLNGYFDNAEYKHDDIFNLDIPQSCPGVPSEIMNPIDTWQDRDKYIIAAKKLANLFYNNFKEKYPNMPENITNAGPKYND

SEQ ID NO: 1169 - DNA, 2013 bp, Arabidopsis thaliana
  CDS (1)..(2013)
atggcgggaaacggaaacgaaagtaccggtggagacttcagtttctcggctgcggcggcccgtgatgcgcttccgaggatcacgactgagaagggcggcaaatctccagggccggcagacgtctgccaggatgacatcgcaccgcgggtcaactttcagaccatcgacgagcttcacagtctccagaagaaacgatctgcccctaccactcctcttagagatggcagcgccagcggagtcagcggaactagtggtccgactactcctgtctccagcgagaccatgcttcaatccgtcagtgcatcgttggcttcgttgacgagagagacaggaccgaagttaataagaggagatccgacttcggcagctaaagtagcacacgtgccagtgactcctacgtcacttccggctgctgacgtcagcgacagtggcttgaagttcactcacatccttcacaacctctctcccgccgagttgtacgagcaagcgataaagtttgagaagggatcgtttgtgacatcgaccggtgcgttggctacattgtctggagccaaaaccggtcggtctcctaaagacaagcgtgtggttaaggatgataccactgaggccgaactctggtggggaaaaggatcaccaaacattgaaatggatgaaaaaacttttttggtgaaccgagagagagctgttgattacttaaactccttggacaaggtgtttgtgaatgatcaatacctaaactgggatccagagaacaaaatcaaagtgagaattgtttcagcaagagcttaccattcactattcatgcacaacatgtgtatccgtccaacacctgaggagttagagaatttcgggacacccgatttcacgatttacaacgcggggaaattcccgtgtaaccgtttcactcattacatgacatcttcgacgagtgtggacataaacctaggaagaagagagatggtgattctaggtacccaatatgctggagaaatgaagaaaggactctttggtgtgatgcattatttgatgcctaagagaaagattttgtctcttcactctggttgtaacatgggcaaagatggagatgttgctctctttttcggactctctggtaccggaaagactacgttgtcgactgaccataaccggtatttgatcggagatgatgaacattgttggagtgaggctggagtttcgaatatcgaaggtggttgttacgcgaaatgcattgatttggctagggacaaagagcctgatatctggaacgctatcaagtttggaaccgttttggagaatgttgtgtttgatgagcatacacgagaagtggattacactgacaaatcagtgacggagaacacacgtgcggcttatccgatagagtacattccaaactcgaagataccgtgcgttggaccacacccgaagaacgtgatcctattggcttgtgacgccttcggtgtgttgccgccaatcagcaagctcaatcttgctcagactatgtaccatttcatcagtggctacactgctctcgttgcaggaacagaggaaggagttaaggaacctcgagcgacattctcagcttgttttggtgctgctttcattatgctacacccaaccaagtacgctgctatgttggctgagaaaatgcaggctcaaggagccaccggttggcttgttaacaccggttggtccggtggaagctacggaactggaagccgaatcaagttggcgtatacacgaaagataatcgatgctatacattcgggtagtctactgaatgcaagttaccgtaaaacagatatttttggtttggagattccaaatgaagtagaaggagttccttctgagatactggaacctattaatgcatggcctgataaaatggcttatgaggacacattgttgaaattggctggtttgtttaaaagcaattttgagacattcacaagtcataagattggtgatgatggaaaattgactgaagagattcttgcagctggtcctaacttctaa

SEQ ID NO: 1170 - protein, 670 aa, Arabidopsis thaliana
MAGNGNESTGGDFSFSAAAARDALPRITTEKGGKSPGPADVCQDDIAPRVNFQTIDELHSLQKKRSAPTTPLRDGSASGVSGTSGPTTPVSSETMLQSVSASLASLTRETGPKLIRGDPTSAAKVAHVPVTPTSLPAADVSDSGLKFTHILHNLSPAELYEQAIKFEKGSFVTSTGALATLSGAKTGRSPKDKRVVKDDTTEAELWWGKGSPNIEMDEKTFLVNRERAVDYLNSLDKVFVNDQYLNWDPENKIKVRIVSARAYHSLFMHNMCIRPTPEELENFGTPDFTIYNAGKFPCNRFTHYMTSSTSVDINLGRREMVILGTQYAGEMKKGLFGVMHYLMPKRKILSLHSGCNMGKDGDVALFFGLSGTGKTTLSTDHNRYLIGDDEHCWSEAGVSNIEGGCYAKCIDLARDKEPDIWNAIKFGTVLENVVFDEHTREVDYTDKSVTENTRAAYPIEYIPNSKIPCVGPHPKNVILLACDAFGVLPPISKLNLAQTMYHFISGYTALVAGTEEGVKEPRATFSACFGAAFIMLHPTKYAAMLAEKMQAQGATGWLVNTGWSGGSYGTGSRIKLAYTRKIIDAIHSGSLLNASYRKTDIFGLEIPNEVEGVPSEILEPINAWPDKMAYEDTLLKLAGLFKSNFETFTSHKIGDDGKLTEEILAAGPNF

SEQ ID NO: 1171 - DNA, 1692 bp, Escherichia coli CFT073
  CDS (1)..(1692): transl_table=11
ttgtcgcggttaacacccccaaaaagactttactattcaggcaatacatattggctaaggagcagtgaaatgcgcgttaacaatggtttgaccccgcaagaactcgaggcttatggtatcagtgacgtacatgatatcgtttacaacccaagctacgatctgctgtaccaggaagagctggacccgagcctgaccggttatgagcgcggggtgttaactaatctgggtgccgttgccgtcgataccgggatcttcaccggtcgttcaccgaaagataagtatatcgttcgtgacgataccactcgcgatactttctggtgggcagacaaaggcaaaggtaagaacgacaacaaacctctctctccggaaacctggcagcatctgaaaggcctggtgaccaggcagctttccggcaaacgtctgttcgttgtcgacgccttctgtggtgcgaacccggatactcgtctttccgtccgtttcatcaccgaagtggcctggcaggcgcattttgtcaaaaacatgtttattcgcccgagcgatgaagagctggcaggtttcaaaccagactttatcgttatgaacggcgcgaagtgcactaacccgcagtggaaagaacagggtctgaactccgaaaacttcgtggcgtttaacctgaccgagcgcatgcagctgattggcggcacctggtacggcggcgaaatgaagaaagggatgttctcgatgatgaactacctgctgccgctgaaaggtatcgcttctatgcactgctccgccaacgttggcgagaaaggcgatgttgcggtgttcttcggcctttccggcaccggtaaaaccaccctttccaccgacccgaaacgccgcctgattggcgatgacgagcacggctgggatgatgacggtgtgtttaacttcgaaggcggctgctacgcgaaaactatcaagctgtcgaaagaagcggaacctgaaatctacaacgctatccgtcgcgatgcgctgctggaaaacgtcaccgtgcgtgaagatggcacaatcgactttgatgatggttcaaaaaccgagaacacccgcgtttcttatccgatctatcacatcgataacatcgttaagccggtttccaaagcgggccacgcaacgaaagttatcttcctgacagcagacgcctttggtgtgctgccgccggtttctcgtctgactgccgatcaaacccagtaccacttcctctctggcttcaccgccaaactggccgggactgagcgtggcatcaccgaaccgacgccaaccttctccgcctgcttcggcgcggcgttcctgtcgctgcacccaactcagtacgcagaagtgctggtaaaacgtatgcaggcagcgggtgcgcaggcgtatctggttaacaccggctggaacggcactggcaaacgtatctccattaaagatacccgcgctattatcgacgccatcctcaacggttcgctggataacgcagaaaccttcactctgccgatgtttaacctggcgatcccaaccgaactgccgggcgtagacacgaagctcctcgatccgcgtaacacctacgcttctccggaacagtggcaggaaaaagccgaaacgctggcgaaactgtttatcgacaacttcgataaatacaccgacacccctgcgggtgccgcgctggtagcggctggtccgaagctgtaa

SEQ ID NO: 1172 - protein, 563 aa, Escherichia coli CFT073
MSRLTPPKRLYYSGNTYWLRSSEMRVNNGLTPQELEAYGISDVHDIVYNPSYDLLYQEELDPSLTGYERGVLTNLGAVAVDTGIFTGRSPKDKYIVRDDTTRDTFWWADKGKGKNDNKPLSPETWQHLKGLVTRQLSGKRLFVVDAFCGANPDTRLSVRFITEVAWQAHFVKNMFIRPSDEELAGFKPDFIVMNGAKCTNPQWKEQGLNSENFVAFNLTERMQLIGGTWYGGEMKKGMFSMMNYLLPLKGIASMHCSANVGEKGDVAVFFGLSGTGKTTLSTDPKRRLIGDDEHGWDDDGVFNFEGGCYAKTIKLSKEAEPEIYNAIRRDALLENVTVREDGTIDFDDGSKTENTRVSYPIYHIDNIVKPVSKAGHATKVIFLTADAFGVLPPVSRLTADQTQYHFLSGFTAKLAGTERGITEPTPTFSACFGAAFLSLHPTQYAEVLVKRMQAAGAQAYLVNTGWNGTGKRISIKDTRAIIDAILNGSLDNAETFTLPMFNLAIPTELPGVDTKLLDPRNTYASPEQWQEKAETLAKLFIDNFDKYTDTPAGAALVAAGPKL

SEQ ID NO: 1173 - DNA, 1623 bp, Shigella flexneri 2a str. 2457T
  CDS (1)..(1623): transl_table=11
atgcgcgttaacaatggtttgcccccgcaagaactcgaggcttatggtatcagtgacgtacatgatatcgtttacaacccaagctacgacctgctgtatcaggaagagctcgatccgagcctgacaggttatgagcgcggggtgttaactaatctgggtgccgttgccgtcgataccgggatcttcaccggtcgttcaccaaaagataagtatatcgtccgtgacgataccactcgcgatactttctggtgggcagacaaaggcaaaggtaagaacgacaacaaacctctctctccggaaacctggcagcatctgaaaggcctggtgaccaggcagctttccggcaaacgtctgttcgttgtcgacgctttctgtggtgcgaacccggatactcgtctttccgtccgtttcatcaccgaagtggcctggcaggcgcattttgtcaaaaacatgtttattcgcccgagcgatgaagagctggcaggtttcaaaccagactttatcgttatgaacggcgcgaagtgcactaacccgcagtggaaagaacagggtctgaactccgaaaacttcgtggcgtttaacctgaccgagcgcatgcagctgattggcggcacctggtacggcggcgaaatgaagaaagggatgttctcgatgatgaactacctgctgccgctgaaaggtatcgcttctatgcactgctccgccaacgttggcgagaaaggcgatgttgcggtgttcttcggcctttccggcaccggtaaaaccaccctttccaccgacccgaaacgccgcctgattggcgatgacgaacacggctgggacgatgacggcgtgtttaatttcgaaggcggctgctacgcaaaaactatcaagctgtcgaaagaagcggaacctgaaatctacaacgctatccgtcgtgatgcgctgctggaaaacgtcaccgtgcgtgaagatggcactatcgactttgatgatggttcaaaaaccgagaacacccgcgtttcttatccaatctatcacatcgataacatcgttaagccggtttccaaagcgggccacgcgactaaggttatcttcctgactgctgatgctttcggcgtgttgccgccggtttctcgcctgactgccgatcaaacccagtatcacttcctctctggcttcaccgccaaactggccggtactgagcgtggcatcaccgaaccgacgccaaccttctccgcttgcttcggcgcggcgttcctgtcgctgcacccgactcagtacgcagaagtgctggtgaaacgtatgcaggcggcgggcgcgcaggcttatctggttaacactggctggaacggcactggcaaacgtatctcgattaaagatacccgcgccattatcgacgccatcctcaacggttcgctggataatgcagaaaccttcactctgccgatgtttaacctggcgatcccaaccgaactgccgggcgtagacacgaagattctcgatccgcgtaacacctacgcttctccggaacagtggcaggaaaaagccgaaaccctggcgaaactgtttatcgacaacttcgataaatacaccgacacccctgcgggtgccgcgctggtagcggctggtccgaaactgtaa

SEQ ID NO: 1174 - protein, 540 aa, Shigella flexneri 2a str. 2457T
MRVNNGLPPQELEAYGISDVHDIVYNPSYDLLYQEELDPSLTGYERGVLTNLGAVAVDTGIFTGRSPKDKYIVRDDTTRDTFWWADKGKGKNDNKPLSPETWQHLKGLVTRQLSGKRLFVVDAFCGANPDTRLSVRFITEVAWQAHFVKNMFIRPSDEELAGFKPDFIVMNGAKCTNPQWKEQGLNSENFVAFNLTERMQLIGGTWYGGEMKKGMFSMMNYLLPLKGIASMHCSANVGEKGDVAVFFGLSGTGKTTLSTDPKRRLIGDDEHGWDDDGVFNFEGGCYAKTIKLSKEAEPEIYNAIRRDALLENVTVREDGTIDFDDGSKTENTRVSYPIYHIDNIVKPVSKAGHATKVIFLTADAFGVLPPVSRLTADQTQYHFLSGFTAKLAGTERGITEPTPTFSACFGAAFLSLHPTQYAEVLVKRMQAAGAQAYLVNTGWNGTGKRISIKDTRAIIDAILNGSLDNAETFTLPMFNLAIPTELPGVDTKILDPRNTYASPEQWQEKAETLAKLFIDNFDKYTDTPAGAALVAAGPKL

SEQ ID NO: 1175 - DNA, 1677 bp, Magnaporthe grisea 70-15
  CDS (1)..(1677)
atgatccacaacaacgtcaacaagacctcgctgcacccgagtggtgtccaggcacatatcccccatgaacacaccgagctagaggaggaactgcacgagaaggcacacatcgactacgacagggtcgctattatccccaacccgtcagttccggcactgtatgaggatgcattggtgtacgagcccggctcggccatatcatcaacgggtgctctcacagcgtactcgggtaacaagacgggtcgttctcccttggacaagcgagttgtcaaggagccgacatcagaaaacgacatctggtggggacccgttaacaagcccatgagccctgacgtctggaagatcaaccgtgagcgcgccatcgactacctcaacacaaggagtcgtatctacgttgtcgacgggtatgctggatgggacgagaagtaccggatccgagtgcgcgtggtttgcgctcgtgcctaccatgccctcttcatgcgcaacatgctcattcgcccgcctcgtgaggagctcgagcacttccagcccgactacaccatttacaacgccggaactttccccgccaataggtataccgagggtatgacttcaggcacctcagtcgccatcaacttcgctgagaaggagatggtcatcctgggtaccgaatatgccggtgagatgaagaagggtatcttcaccgtcttgttctacgagatgcccatcaagcacaacgtgctcacgttgcattcgtctgcgaacgagggcaagaacggagacgtcacactcttcttcggtctgtcgggtactggcaagaccacgctgtcagctgaccccaaccgcatgctgatcggtgatgacgagcactgctggagcgacagcggtgtcttcaacattgagggtggttgctacgcaaagtgcatcggtctctcggccgagaaggagcccgatatctttggtgccatccagttcggctcagtcctcgagaacgtcgtatttgaccctaacactagggtcgtcgactacgatgactgcaccctgaccgagaacacccgatgtgcctaccccatcgagtacatctccaacgccaagatcccctgcctgtccaacaaccaccccagcaacatcatcctcctgacctgcgacgcccgtggtgttctcccgccgatctccaagctcaacagcgcccagaccatgttccacttcatctccggttacacctccaagatggccggtaccgaggacggtgttactgagccgcaagccactttctcgtcatgctttgcccagcccttcctggccctgcacccgatgcgctacgccaagatgttggctgacaagattgagcaccacaacgccaacgcctggttgctcaacaccggttgggtcggtgccggtgccgctcagggtggcaagcgctgccctctcaagtacactcgtgccattctcgacgccatccactcgggcgagctcgccaagcaggagtacgagacgtatgaggtctttaacctccaggtgcccaagagctgccctggcgtgccctcggagctgctcaaccccaaggccgcctggaccgctgggaacgacagcttcgacaccgaggtcaagaagcttggtggcctgttccttgagaacttcaagaagtacgagagcgaggctactgaggatgtcatcaaggccggtcccgttgtctga

SEQ ID NO: 1176 - protein, 558 aa, Magnaporthe grisea 70-15
MIHNNVNKTSLHPSGVQAHIPHEHTELEEELHEKAHIDYDRVAIIPNPSVPALYEDALVYEPGSAISSTGALTAYSGNKTGRSPLDKRVVKEPTSENDIWWGPVNKPMSPDVWKINRERAIDYLNTRSRIYVVDGYAGWDEKYRIRVRVVCARAYHALFMRNMLIRPPREELEHFQPDYTIYNAGTFPANRYTEGMTSGTSVAINFAEKEMVILGTEYAGEMKKGIFTVLFYEMPIKHNVLTLHSSANEGKNGDVTLFFGLSGTGKTTLSADPNRMLIGDDEHCWSDSGVFNIEGGCYAKCIGLSAEKEPDIFGAIQFGSVLENVVFDPNTRVVDYDDCTLTENTRCAYPIEYISNAKIPCLSNNHPSNIILLTCDARGVLPPISKLNSAQTMFHFISGYTSKMAGTEDGVTEPQATFSSCFAQPFLALHPMRYAKMLADKIEHHNANAWLLNTGWVGAGAAQGGKRCPLKYTRAILDAIHSGELAKQEYETYEVFNLQVPKSCPGVPSELLNPKAAWTAGNDSFDTEVKKLGGLFLENFKKYESEATEDVIKAGPVV

SEQ ID NO: 1177 - DNA, 1740 bp, Gibberella zeae PH-1
  CDS (1)..(1740)
atgattgaaccactacacccaatttctactattccaccagtccaaaaaaacaatactgaccttgtcgcagtgcttcccaacaacgttaacaagacttccctccaccctaccggtgttactccccaccaggagcacaccgagttggaacaggagctccacgacaaggctcacatcgattacgatcgtgtcgctattatccctaacccttcagtcgctgccctctacgaggatgctcttgtctacgagactggtaccgctatcacatccagcggtgccctgactgcctactctggcgctaagactggtcgatctcctctcgacaagcgaatcgtcgaggaggcttcttccaaggacaacatttggtggggacctgtcaacaagcccatgactcctgaggtctggaagatcaaccgagaacgtgctgtcgattacctcaacacccgaagccgtatctatgtcattgatggttttgccggctgggacgagaagtaccgcatcaaggtccgagttatctgcgcccgcgcctaccatgctctcttcatgcgaaacatgcttatccgacctacacgagaggagctcaacgacttccaccccgactacacaatctacaatgctggcaagttccctgccaaccgatacaccgagggtatgacctccggtacatcagttgccatcaacttcgagcagaaggagatggtcatcctcggtactgagtatgctggtgaaatgaagaagggagtcttcactgttcttttctacgagatgcccatcaagcacaacgtcctcactcttcactcctccgccaacgagggcaagaacggcgatgtcacccttttcttcggtctctctggaactggcaagaccactctctccgccgaccccaaccgagccctcattggtgacgacgagcactgctggtctgacaacggtgttttcaacatcgagggtggttgctacgccaagaccattggtctgtccgctgagaaggagcccgatatctatggcgctatccgatacggttccgtccttgagaacgtcgttttcgaccctctcacccgtgaggtcgactacgatgacgctaccctcactgagaacacccgatgcgcctaccccatcgagtacatctccaacgccaagattccttgcctctctcccaactctccctccaacatcatcctcctcacttgcgacgcccgcggtgtcctgcctcctatctccaaacttgacagcgcccagaccatgttccacttcatctctggttacacctccaagatggccggtactgaggacggcgtcaccgagccccaggctaccttctccagctgcttcgctcagcccttccttgctctgcaccccatgaagtacgccaagatgcttgccgacaagattgagacacacaaggccaacgcctggctcctcaacaccggttgggtcggtgccggtttcgcccagggcggcaagcgatgccccctcaagtacacccgtgccatcctcgacgccatccactctggtgacctcgccaacgttgagtacgagaactacggtgtcttcaacctccaggtccccaagtcctgccccaacgttccttcagaacttctcaacccctccaaggcctggaccgctggtgaggacagcttcaacactgaggttgtcaagctcggcaagctcttccgcgagaacttcgccaagtacgagagcgaggccaccgaagatgtcgtcaaggccggccccgttgtctaa

SEQ ID NO: 1178 - protein, 579 aa, Gibberella zeae PH-1
MIEPLHPISTIPPVQKNNTDLVAVLPNNVNKTSLHPTGVTPHQEHTELEQELHDKAHIDYDRVAIIPNPSVAALYEDALVYETGTAITSSGALTAYSGAKTGRSPLDKRIVEEASSKDNIWWGPVNKPMTPEVWKINRERAVDYLNTRSRIYVIDGFAGWDEKYRIKVRVICARAYHALFMRNMLIRPTREELNDFHPDYTIYNAGKFPANRYTEGMTSGTSVAINFEQKEMVILGTEYAGEMKKGVFTVLFYEMPIKHNVLTLHSSANEGKNGDVTLFFGLSGTGKTTLSADPNRALIGDDEHCWSDNGVFNIEGGCYAKTIGLSAEKEPDIYGAIRYGSVLENVVFDPLTREVDYDDATLTENTRCAYPIEYISNAKIPCLSPNSPSNIILLTCDARGVLPPISKLDSAQTMFHFISGYTSKMAGTEDGVTEPQATFSSCFAQPFLALHPMKYAKMLADKIETHKANAWLLNTGWVGAGFAQGGKRCPLKYTRAILDAIHSGDLANVEYENYGVFNLQVPKSCPNVPSELLNPSKAWTAGEDSFNTEVVKLGKLFRENFAKYESEATEDVVKAGPVV

SEQ ID NO: 1179 - DNA, 1662 bp, Debaryomyces hansenii CBS767
  CDS (1)..(1662)
atgacacctcctactgctgttgaatcatcaattaactttggtggtcacccaactattaaatctactgctgaaccagttgtgaagcaattatcgttagctgatgatactgttatccgtcacaacgcaccaccaccaactttatatgaagatggtttattggaaaaaggtacagttatttcatccacaggtgctttaatggcctactctggtaagaagaccggtagatcaccaaaggataagagaattgttgatgaagaaacctctacacaaaatatttggtggggtcccgtcaacaagcaagttgacgaattaacctggaaaatttccagatccagagctttggactacttgagaaccagagaaaagttgttcgttgttgatgcatacgctggttgggatccaagatacagactcaagattagagttatctgtgctagagcttaccacgctttattcatgaccaacatgttgatcagaccaactgaagaagaattaaagaactttggtgaaccagatttcactatttacaatgctggtcaattcccagctaacgttcacaccaagggtatgacctcttctacttctgttgaaatcaacttcaaggatatggaaatggttatcttaggtactgagtatgctggtgaaatgaagaagggtattttcactgttatgttctacttgatgccaataaagcacaagatcttaactttgcattcttccgctaaccaaggtgaacaaaagggtgatgttacattattctttggtttatctggtaccggtaagaccactttatctgctgatccaaacagaaagttgattggtgatgatgaacattgttggtctgacaacggtgtcttcaacattgaaggcggttgttacgctaagtgtttagatttatcagctgaaaaagaaccagaaattttcaactctatcaagttcggtgctatcttagaaaacgttgtctacgaccaaaactctaaggtagttgactacgccgactcgactatcacagaaaacacaagatgtgcatacccaattgatttcattccatctgctaagattccatgtttagctgatgaacatccaacaaacattgttttgttaacttgtgatgcatctggtgtcttaccaccagtctctaaattgactaacgctcaagttatgtatcatttcatcagtggttacacttctaagatggctggtaccgaagaaggtgttactgaaccacaagctactttctctgcatgtttcggtcaaccattcttagtcttgcatccaatgaaatacgctcaacaattatctgacaagatcagtaagcacaacgccaacgcttggttattgaataccggttgggttggtgcttctgctgctcaaggtggtaatagatgttctttgaaatacaccagagctatcttggatgctatccactctggtgaattaagtaaggttgagttcgagaacttcccaactttcaatttgaatgttccaaagtcttgtccaaatgttccatctgaaatcttgaacccaactaaggcttggaccgaaggtgacgcctcattccaaaaggaaatcaagtccttagctggtaagttcgccgaaaactttaccaagtatgctgatcaagctaccactgaagtcaaggctgctggtcctgatgcttaa

SEQ ID NO: 1180 - protein, 553 aa, Debaryomyces hansenii CBS767
MTPPTAVESSINFGGHPTIKSTAEPVVKQLSLADDTVIRHNAPPPTLYEDGLLEKGTVISSTGALMAYSGKKTGRSPKDKRIVDEETSTQNIWWGPVNKQVDELTWKISRSRALDYLRTREKLFVVDAYAGWDPRYRLKIRVICARAYHALFMTNMLIRPTEEELKNFGEPDFTIYNAGQFPANVHTKGMTSSTSVEINFKDMEMVILGTEYAGEMKKGIFTVMFYLMPIKHKILTLHSSANQGEQKGDVTLFFGLSGTGKTTLSADPNRKLIGDDEHCWSDNGVFNIEGGCYAKCLDLSAEKEPEIFNSIKFGAILENVVYDQNSKVVDYADSTITENTRCAYPIDFIPSAKIPCLADEHPTNIVLLTCDASGVLPPVSKLTNAQVMYHFISGYTSKMAGTEEGVTEPQATFSACFGQPFLVLHPMKYAQQLSDKISKHNANAWLLNTGWVGASAAQGGNRCSLKYTRAILDAIHSGELSKVEFENFPTFNLNVPKSCPNVPSEILNPTKAWTEGDASFQKEIKSLAGKFAENFTKYADQATTEVKAAGPDA

SEQ ID NO: 1181 - DNA, 1671 bp, Yarrowia lipolytica CLIB122
  CDS (1)..(1671)
atgtctccccccgtcaaccagacccaacttcaccccaagggcgtcgagcccactcccgccgctgaggagattgagaaggaactctacgacattgctcacatcgagtacgagcgagtcaacattgaccacaacccctcggtggcctccctgtacgaggacgccctggtgcaggagtctggctctgccatcaactccaccggcgctctggtcgcctcgtccggaaagaagaccggccgatctcccaaggacaagcgaattgtggaggagcccggttccgtcgagcacatctggtggggccccgtcaacaagaagctgtctgagcagtcgtggctcatcaaccgagagcgagctgtcgactacctcaacacccgaaagcgaatctacgttgtggacgcctacgccggctgggaccccaagtaccgaatcaaggtgcgaattgtctgtgcccgagcctaccacgctctgttcatgcgaaacatgctgatccgacccaccgccgaggagctcaagaactttggcaagcccgacttcaccatctacaacgctggcgccttccccgccaaccgatacacctcgggaatgacctccaacacctcgatcgacatcaacttcaagtccatggagatgctcattctgggaactgagtacgccggtgagatgaagaagggtatcttcactgtcatgttctacctcatgcccgtcaagcaccaggtgcttactctgcactcttctgccaacgagggcaaggatggcgatgtcactcttttctttggcctgtccggaaccggaaagactactctgtctgccgaccccaaccgacttctgatcggagacgacgagcactgctggtccgacaccggcgtcttcaacattgagggcggctgctacgccaagtgcctgggtctctctcgagagaaggagcccgatattttcgacgccatcaagtttggctctgttctggagaacgttgtcttcgaccccattacccgagaggtcgactacgacgacgctaccctcaccgagaacacccgatgctcctaccccatcgagtacattcccaacgccaagctgccctgtgtcactgagtcccaccccaccaacatcattctgctcacctgtgatgcccgaggtgtcattccccccatctccaagctcaccaacgagcaggtcatgtaccacttcatttccggttacacctccaagatggccggaaccgaggagggtgtcactgagcccgaggccactttctctgcatgctttggccagcccttcctggttctgcaccccatgcagtacgccaagatgctgtctgataagatgacccagcacaacgccaacgcctggctgctcaacaccggatggaccggccagtcttacaccaacggaggcaagcgatgccctctcaagtacactcgatccattctggacgccatccactctggtgagctcgccaaggtcgagtacgagaactttgacgttttcaacctccaggttcccaagaccgcccccaacgtgccttctgagatcctcaaccccgcccgagcctggtccggaggaaaggagcagttcaccgaggaggtcaccaagctcggcaagctgttcaacgagaactttgagaagtacaaggacatggctatccccgaggtcattgctgccggccctaaggcttag

SEQ ID NO: 1182 - protein, 556 aa, Yarrowia lipolytica CLIB122
MSPPVNQTQLHPKGVEPTPAAEEIEKELYDIAHIEYERVNIDHNPSVASLYEDALVQESGSAINSTGALVASSGKKTGRSPKDKRIVEEPGSVEHIWWGPVNKKLSEQSWLINRERAVDYLNTRKRIYVVDAYAGWDPKYRIKVRIVCARAYHALFMRNMLIRPTAEELKNFGKPDFTIYNAGAFPANRYTSGMTSNTSIDINFKSMEMLILGTEYAGEMKKGIFTVMFYLMPVKHQVLTLHSSANEGKDGDVTLFFGLSGTGKTTLSADPNRLLIGDDEHCWSDTGVFNIEGGCYAKCLGLSREKEPDIFDAIKFGSVLENVVFDPITREVDYDDATLTENTRCSYPIEYIPNAKLPCVTESHPTNIILLTCDARGVIPPISKLTNEQVMYHFISGYTSKMAGTEEGVTEPEATFSACFGQPFLVLHPMQYAKMLSDKMTQHNANAWLLNTGWTGQSYTNGGKRCPLKYTRSILDAIHSGELAKVEYENFDVFNLQVPKTAPNVPSEILNPARAWSGGKEQFTEEVTKLGKLFNENFEKYKDMAIPEVIAAGPKA

SEQ ID NO: 1183 - DNA, 1671 bp, Aspergillus nidulans FGSC A4
  CDS (1)..(1671)
atggttgctacttctgtgaaccgtactgccctgcaccctggtggtgtccaacccggcaagggccacaccgaactcgaagaagaacttcatgaacacgcccacatcgactacgaccgcgttgctattattgccaacccttctgtcgctgccctctatgaagacgctcttgtctacgagactggtactgctatcacatcaagcggtgctctcacagcctactctggcgccaaaactggtcgctctccttcagataagcgaatcgtgaaggaggagtcttcagagaaggaggtctggtggggacccgtcaacaagcctatgaccccggatgtctggcgtatcaaccgtgagcgtgctgtcgactacctcaacacccgaaaccgtatctacgtgattgatggtttcgctggctgggatgagcgctaccgtatcagcgtccgtgtcgtctgcgcgcgcgcctaccatgctctcttcatgcgcaacatgcttatccgaccttctgccgaagaacttaagcacttccaccctgactacgtgatctacaacgctggttccttccctgccaaccgcttcactgagggtatgacatctgccacctccgtcgctatcaactttgccgagaaggagatggttatcctcggtactgagtacgccggagagatgaagaagggtgtcttcaccatcctcttctacgagatgcccgtcaagcacaatgtcctgaccttgcactcttctgccaacgagggccagaacggcgacgttactgtcttcttcggtctgtccggaactggcaaaaccaccctctccgccgaccccaagcgtgctttgatcggtgacgacgagcactgctggactgaccgtggtgtcttcaacatcgagggtggctgctacgccaagtgcattggcctctccgccgagaaggagcctgatatcttcaacgccatccgctttggttccgtcctcgagaacgtcgtcttcgaccccatcagccgcgttgttgactacgacgactccaccctcaccgaaaacacccgctgtgcctaccccatcgagtatattgagaacgccaaggttccctgcctctccgacagccacccctcaaacatcatcctcctcacatgcgatgctcgtggtgtactcccccctatctccaagcttaccaccgagcagaccatgttccacttcatctccggttacacctccaagatggccggtaccgaggacggtgtcacagagccccaggctaccttctcttcctgctttgcccagcccttccttgccctgcaccccatgcgctacgcccgcatgctcgcggacaagatctctcagcacaaggccaacgcctggcttctcaacaccggatgggttggcgctggcgccaccaccggcggcaagcgttgcccgctcaagtacactcgtgccatcctcgatgccatccacagcggcgagctcgccaaggctgagtacgagacttacgacgtcttcaaccttcacgtgcccaagagctgccccggtgtgcctgatgagcttctgaaccccaagaacagctggaccgctaccaccagcttctcggacgaggtcaacaagctcgctaagctgtttaacgagaatttccaaaagtacgctgaccaagccaccaaggaagtcatcgcggccggtcccgttgtccagtaa

SEQ ID NO: 1184 - protein, 556 aa, Aspergillus nidulans FGSC A4
MVATSVNRTALHPGGVQPGKGHTELEEELHEHAHIDYDRVAIIANPSVAALYEDALVYETGTAITSSGALTAYSGAKTGRSPSDKRIVKEESSEKEVWWGPVNKPMTPDVWRINRERAVDYLNTRNRIYVIDGFAGWDERYRISVRVVCARAYHALFMRNMLIRPSAEELKHFHPDYVIYNAGSFPANRFTEGMTSATSVAINFAEKEMVILGTEYAGEMKKGVFTILFYEMPVKHNVLTLHSSANEGQNGDVTVFFGLSGTGKTTLSADPKRALIGDDEHCWTDRGVFNIEGGCYAKCIGLSAEKEPDIFNAIRFGSVLENVVFDPISRVVDYDDSTLTENTRCAYPIEYIENAKVPCLSDSHPSNIILLTCDARGVLPPISKLTTEQTMFHFISGYTSKMAGTEDGVTEPQATFSSCFAQPFLALHPMRYARMLADKISQHKANAWLLNTGWVGAGATTGGKRCPLKYTRAILDAIHSGELAKAEYETYDVFNLHVPKSCPGVPDELLNPKNSWTATTSFSDEVNKLAKLFNENFQKYADQATKEVIAAGPVVQ

SEQ ID NO: 1185 - DNA, 1662 bp, Candida albicans SC5314
  CDS (1)..(1662): transl_table=12
atggctcctcctactgctgttgaatcttcaatcaatttcggaggtcacccaactatcaaatccactcaagacccattggtccaaaagttgtctcttaataccgacactgtgatcagacacaatgctccacctccaaccttatacgaagatggtttattagaaaaaggtactactatctcatctactggtgctttaatggcttactctggtaacaaaaccggtagatctcctaaagacaagagaattgtcgacgaatccacctcatcccataacatttggtggggtccagtgaataaacaagttgacgaattaacttggaagatttctagatcaagagctttggattacttgagaactagagaaaagttgtttgttgttgacgcttatgctggttgggatccaagatacagaatcaaggtcagaattatctgtgctagagcttaccatgctttgttcatgaccaatatgttgatcagaccaactgaagaagaattaaaaaactttggtgaaccagatttcaccatctacaatgctggtcaattcccagccaacatccacactaaaggtatgacttctgccacttctgttgaaatcaactttaaagatatggaaatggttatcttgggtactgaatatgctggtgaaatgaagaaaggtatctttactgttatgttctacttgatgccaatcaaacacaaggttttgactttgcactcctcatgtaaccaaggggttgaaaaaggtgatgtcactttgttctttggtctttctggtactggtaagaccactttgtctgctgatccacaaagaaagttgattggtgatgacgaacattgttggtccgacaatggtgtgttcaacattgaaggtggttgttacgccaaatgtttggacttgtctgctgaaaaagaaccagaaattttcaactccatcaagtttggtgctattttggaaaatgttgtctacgacccaatcaccaaggttgttgactacgaagattcatcaatcactgaaaacactagatgtgcatacccaattgatttcattccatctgccaagattccatgtttggccgacacccatccaaccaatattatcttgttaacatgtgatgcttccggtgtgttgccaccagtctccaaattgactaatgctcaagttatgtatcatttcatttctggttacacctccaagatggcaggtactgaagaaggtgttactgaaccacaagctacattctccgcatgtttcggtcaaccattcttggtgttgcacccaatgaaatatgctcaacaattgtctgacaagatttccgaacacaatgccaacgcttggttgttgaacactggttgggttggttcttctgttgctcaaggtggtaagagatgtccattgaaatacaccagagctatcttggatgctatccactctggtgaattgtctaaagtcgaatacgaaaaagttccagttttcaaccttaatgttccaacttcttgtcctggtgttccaagtgaaattttgaacccaactaaagcttggacccaaggtactgattcattcaacaaggaaatcaaatctcttgctaccaagtttgctgaaaacttcaagacatacgctgatcaagctactgctgaagttaaagctgctggtccagaagcataa

SEQ ID NO: 1186 - protein, 553 aa, Candida albicans SC5314
MAPPTAVESSINFGGHPTIKSTQDPLVQKLSLNTDTVIRHNAPPPTLYEDGLLEKGTTISSTGALMAYSGNKTGRSPKDKRIVDESTSSHNIWWGPVNKQVDELTWKISRSRALDYLRTREKLFVVDAYAGWDPRYRIKVRIICARAYHALFMTNMLIRPTEEELKNFGEPDFTIYNAGQFPANIHTKGMTSATSVEINFKDMEMVILGTEYAGEMKKGIFTVMFYLMPIKHKVLTLHSSCNQGVEKGDVTLFFGLSGTGKTTLSADPQRKLIGDDEHCWSDNGVFNIEGGCYAKCLDLSAEKEPEIFNSIKFGAILENVVYDPITKVVDYEDSSITENTRCAYPIDFIPSAKIPCLADTHPTNIILLTCDASGVLPPVSKLTNAQVMYHFISGYTSKMAGTEEGVTEPQATFSACFGQPFLVLHPMKYAQQLSDKISEHNANAWLLNTGWVGSSVAQGGKRCPLKYTRAILDAIHSGELSKVEYEKVPVFNLNVPTSCPGVPSEILNPTKAWTQGTDSFNKEIKSLATKFAENFKTYADQATAEVKAAGPEA

SEQ ID NO: 1187 - DNA, 1659 bp, Ustilago maydis 521
  CDS (1)..(1659)
atgacttcgccaggaaaccaccacgatgatttgctcaccaacaaccctcactacacgctcttgggctccgacctgaagctcttctcggatgccggtttcgacatggacaagattcacctgaagcgcaatgcttccgtcgcgcagctctacgaagacgccatcaagaaagagggcgccgttatctcgtcggccggtgccttgatcaactactctggcaagaagaccggtcgttcgcccaaggacaagcgtatcgttttcgaggagacctccaaggaccacgtgtggtggggtcccgtcaacatcaagatggatgagcacacgtttgagatcaaccgtgagcgtgccatcgactacctcaacacccgtgacgacatttacgtctttgacggctttgcaggctgggaccccaagtaccgcatcaaggtgcgaatcatctgcagccgtgcctaccacgcgcttttcatgaacaacatgcttattcgccctaccgccgaagagctcgagcactttggtgagcccgactttatcatctacaacgccggtcagttccctgccaaccgtttcaccgccggtatgacttcatccacatcggtcgaggtcaactttaagcgtcacgagatggttatcctcggtaccgagtacgcgggtgagatgaagaagggcatcttctcggtcatgcactacctcatgcccgtcaagtttaaccagctctcgctgcactcttcggccaacgagggccctgacggtgacgtatcgctcttctttggtctctcgggtaccggcaagaccacgctctcggccgaccccaagcgtgcgctcatcggcgacgacgagcacgtgtggtcggacgagggtgtgttcaacattgagggtggttgctacgccaagtgcatcggtctctctgctgccaaggagcccgagatctacaacgcgattcgctttggtgccgtgctggaaaacgtcgtgtacgacaaaaacacgcgtgaagtcgactacgacgatgtggtgattacggaaaacacgcgatgctcgtacccgatcgagtttatccccaacgccaagatcccctgcatgtccaactcgccacccaagaacatcatcttcttgacttgcgacgcttacggtgtcttgccgcccgtctcgaagctggatgccaaccaggctcagtaccactttatctcgggttacacctccaagacgcccggtaccgaggatggtatccaggagccgtcgcccaccttctcgacgtgctacggtcagccattcattgtgcttcaccctcgcgtttacgccaagatgcttgccgagcgcatggagaagcacaaggccgacgtctggctcgtcaacaccggttgggcgggtggcaagtttggtgtcggtcagcgatgccctctcaagtacacgcgcaagatcatcgactcgatccacgacggctcattggccaagtccaagttccagaactttggcgtgttcaacctgcagatccctgaggccatcgagggcgtccccgagacgctgctcaaccctgccaccagctggccagacaagggcgcattcaaggccgagctgaacaagctcgccgagatgttctcgaccaactttgaaaagtacgtcaacgacgtttctgccgaggtcgccgctgctggccccaagctttga

SEQ ID NO: 1188 - protein, 552 aa, Ustilago maydis 521
MTSPGNHHDDLLTNNPHYTLLGSDLKLFSDAGFDMDKIHLKRNASVAQLYEDAIKKEGAVISSAGALINYSGKKTGRSPKDKRIVFEETSKDHVWWGPVNIKMDEHTFEINRERAIDYLNTRDDIYVFDGFAGWDPKYRIKVRIICSRAYHALFMNNMLIRPTAEELEHFGEPDFIIYNAGQFPANRFTAGMTSSTSVEVNFKRHEMVILGTEYAGEMKKGIFSVMHYLMPVKFNQLSLHSSANEGPDGDVSLFFGLSGTGKTTLSADPKRALIGDDEHVWSDEGVFNIEGGCYAKCIGLSAAKEPEIYNAIRFGAVLENVVYDKNTREVDYDDVVITENTRCSYPIEFIPNAKIPCMSNSPPKNIIFLTCDAYGVLPPVSKLDANQAQYHFISGYTSKTPGTEDGIQEPSPTFSTCYGQPFIVLHPRVYAKMLAERMEKHKADVWLVNTGWAGGKFGVGQRCPLKYTRKIIDSIHDGSLAKSKFQNFGVFNLQIPEAIEGVPETLLNPATSWPDKGAFKAELNKLAEMFSTNFEKYVNDVSAEVAAAGPKL

SEQ ID NO: 1189 - DNA, 1656 bp, Cryptococcus neoformans var. neoformans B-3501A
  CDS (1)..(1656)
atggctcccagacaacaccaccacgacgaattcgagagcaatcagttcctcggtaaggaactcaagtatttctcccaggctggttttgacttggaccgaatccacatcaagagaaatgcccctatcgcctccctctatgaagacgccattctcaacgaaggtgctatcatctcttcaaatggtgcccttatcaacttctccggcaagaagactggtcgaagtcccaaggacaagcgaattgtctttgaagaaactagcaaggatgacatttggtggggccccgtgaatatcaagatggacgagcacactttcgagattaaccgagaacgagctatcgactacctcaataccagagaaaatgtctatgtcttcgacggtttcgccggttgggatcccaagtacaggatcaaggtccgggtcattgcttcccgagcctaccacgccctcttcatgcacaatatgctcattcgaccaactcctgaggaactcgaaaatttcggcgagcccgatttcatcatctacaacgctggtcaattccctgccaaccgattcaccaccggcatgacttccaccacctccgttgggatcaacttcaagcgaatggagatggttatcctcggtaccgagtatgccggtgagatgaagaagggtatcttctccgtcatgcactacctccaacccgtcaagttcggccagctttccctccactcttcagccaaccaaggtatcggaaagaatgatgatgtcaccctcttcttcggtcttagtggtactggcaagaccactctttccgccgacgctaacagattattaattggtgacgatgagcacgtctggagtgacactggtgtctttaacattgagggtggctgttacgccaagtgcatcaacctctctgccgaaaaggaacccgagatcttcaatgccatcaagtttggctctatcctcgaaaatgttgtctacaaccccgccgatcgtaaacccgactacgacgacgtttccatcaccgagaacactcgatgtgcctaccccatcgagtacatccctaacgccaaaatcccctgtatcgcagaccgtcaaccctctaacatcattatgctctgttgcgacgccttcggtgtccttccccccgtctcccgacttacccccgagcaggctcagtaccacttcgtcgctggttacacctccaagacccccggtactgaagatggtatcgtcgagccctccccaacattctctacatgctacggtcagcccttcatcgtcctccaccccggcaggtacgccaagatgctcgctgaaaggatggagaagaacagtgtcaactgttggttgataaacactggttggactggtggcaagtttggtaccggcaaacgatgccctctcaagtacacgcgagctattgtcgacgccatccacaacggctctctcgccaaagccgagtacgaaaacttccccatcttcaacctcgccattcccaaggctgttgagggtgtgcccagtgacatcttgaaccccgaaaaggcctggccgagcaaggaggctttcaaggccgagttggataagttgggcaacatgttccagaaggcttttgccaagtacgaaacagatattgatgagaaggtcaagctgtcgggtcctgtgttcgcgtaa

SEQ ID NO: 1190 - protein, 551 aa, Cryptococcus neoformans var. neoformans B-3501A
MAPRQHHHDEFESNQFLGKELKYFSQAGFDLDRIHIKRNAPIASLYEDAILNEGAIISSNGALINFSGKKTGRSPKDKRIVFEETSKDDIWWGPVNIKMDEHTFEINRERAIDYLNTRENVYVFDGFAGWDPKYRIKVRVIASRAYHALFMHNMLIRPTPEELENFGEPDFIIYNAGQFPANRFTTGMTSTTSVGINFKRMEMVILGTEYAGEMKKGIFSVMHYLQPVKFGQLSLHSSANQGIGKNDDVTLFFGLSGTGKTTLSADANRLLIGDDEHVWSDTGVFNIEGGCYAKCINLSAEKEPEIFNAIKFGSILENVVYNPADRKPDYDDVSITENTRCAYPIEYIPNAKIPCIADRQPSNIIMLCCDAFGVLPPVSRLTPEQAQYHFVAGYTSKTPGTEDGIVEPSPTFSTCYGQPFIVLHPGRYAKMLAERMEKNSVNCWLINTGWTGGKFGTGKRCPLKYTRAIVDAIHNGSLAKAEYENFPIFNLAIPKAVEGVPSDILNPEKAWPSKEAFKAELDKLGNMFQKAFAKYETDIDEKVKLSGPVFA

SEQ ID NO: 1191 - DNA, 1542 bp, Desulfitobacterium hafniense Y51
  CDS (1)..(1542): transl_table=11
atggatcaaattgttcatcataatttagaggtatcagaattagttgacatggcccttgagcgtggagaaggtactcttgcttccagtggagcatttcgtgtaagtacggggaaatataccggacgttcccctctcgataaatttatcgtcgatgaaccttcggtccatgagcggatcgattggggctcagtgaaccgccctattgcccaggaatactttgagaagctttatgatgaagtccaagcctatctagaagctaaagaagaagtgtttatttttgatggctttgccggggcagatgaagaataccggcttcccatccgggtcatcaatgagttcgcctggcaaaatctctttgtacaccaactctttattcgccccaccccagaggaattagataaccatcaagcccagtttacgattattgctgtccccagctttaaagctgatccggaagtccatggaacccattccgaggcctttatcatttgctccttcgaaaagcgggtggtattgattggggggacccattatgccggcgagatgaagaaatccattttcagcgtcatgaactactatttgcctttaagggaagtcatgcccatgcattgttcggccaatatcggtgcggatggggatgtagccctgttctttggtttatccggaacgggaaagaccaccctttccgccgatccggagcgctgtttaatcggtgatgatgagcatggctggtcaaaaaacggggtctttaattttgaagggggctgctatgccaaatgcatcaacctttccgaggaaaaagaaccgcagatttggcaggccatccgctttggaacggttctggaaaacgtcgttcttcatccggacacccaggttgccgattatgacgatgccacactgacggaaaatacacgggcggcttaccccatcgactatatcgaaggagccgtaatccccggtgtagggggacagcctaaggtgattgttttcctcaccgcggacgcctttggcgtattgcctcccatcgccaaactcaccaaggaacaagcgatgtatcatttcttatccggatatacctccaagctggccggaactgagcggggaattacagagccacaggcgactttttccacctgctttggtgctcccttccttcctttggcaccccaagtgtatgcggaaatgctgggagagagaatcgacacctatggcacacgggtctatctggtcaataccggttggtccggcggcgcttacggggtgggcaagcgtatcaaactgggctatacccgggcgatgattacggcagccctccagggcactttggagcaggctgaattcaccgctgatccgaattttggcgtcctggttcctgaccatgtggaaggggtacccagtgaggttttaaatccaagattgacctggcagaataaagaggcttatgatatcaatgccagggaactggctcagcgcttccaaaagaacttcgagcaatttgcccagactgctgaagaaatccgccaggccgggccgaaagcttaa

SEQ ID NO: 1192 - protein, 513 aa, Desulfitobacterium hafniense Y51
MDQIVHHNLEVSELVDMALERGEGTLASSGAFRVSTGKYTGRSPLDKFIVDEPSVHERIDWGSVNRPIAQEYFEKLYDEVQAYLEAKEEVFIFDGFAGADEEYRLPIRVINEFAWQNLFVHQLFIRPTPEELDNHQAQFTIIAVPSFKADPEVHGTHSEAFIICSFEKRVVLIGGTHYAGEMKKSIFSVMNYYLPLREVMPMHCSANIGADGDVALFFGLSGTGKTTLSADPERCLIGDDEHGWSKNGVFNFEGGCYAKCINLSEEKEPQIWQAIRFGTVLENVVLHPDTQVADYDDATLTENTRAAYPIDYIEGAVIPGVGGQPKVIVFLTADAFGVLPPIAKLTKEQAMYHFLSGYTSKLAGTERGITEPQATFSTCFGAPFLPLAPQVYAEMLGERIDTYGTRVYLVNTGWSGGAYGVGKRIKLGYTRAMITAALQGTLEQAEFTADPNFGVLVPDHVEGVPSEVLNPRLTWQNKEAYDINARELAQRFQKNFEQFAQTAEEIRQAGPKA

SEQ ID NO: 1193 - DNA, 1656 bp, Saccharophagus degradans 2-40
  CDS (1)..(1656): transl_table=11
atggcactaaacgagcagcaaacgaattttaaaataggtgcgcctttcgcttctgatgtgtctgtgtttttagctaatctgggtataagcgcaagcgaaattgtgcgcaaccctagttacgacatgttgtacaggaatgagttagatgaaaatttacaaggctgcgagcgcggtattttaaccaaaaccggtgcagtgaatgtagatactggcgtttttactggtcggtcgccgaaggataaatatattgttaaagatgaaaaagcatcggcgaatgtttggtggcccagcgatgccgcgtctaacgataaccatcctatggatcaaagtacgtggaccagactaaaagcagtgtgtaccaatcaacttaataataagccgctgtatgttgtggatgcattttgcggtgccagcgacgatgtgcgcgtaagtgtacgatttgttacagaggtggcgtggcaggcgcactttgttactaatatgtttattcgtccgacccaggcgcagcttgatgcgtttactccagactttgttgtgttgaatgcttccaaggctgtaaatacgcaatggcagcagcaggggttaaactctgaaaattttgtagcctttaatttaactgaaaacatgcagcttattggcggcacctggtatggtggcgaaatgaaaaaaggcatgttctcggtaatgaattattacttgccactacatggccgagcctccatgcacgcctctgccaatgttggtagcgatggcgatgtggccgttttctttggcttgtctggcacgggcaaaacaacactctcagcagaccctcagcgcgctctcattggcgacgatgagttggggtgggatgacgaaggcgtatttaatttagagggcggctgctacgctaaaaccattgatttaagtgagcaaaacgaacccgatatctttcgcgcaattcggcgagatgcactgcttgaaaatgttgcagtggatgcgaatggcgaggtggattatagcgatgtaagtaaaacgcaaaatacgcgagtgtcttaccctatttatcacattccaaattgcgttaagcctgtgtcacgtggtggtcacgcgcgtaaaattatctttcttaccgccgatgcctttggtgtgtttccgccagtaagtaagcttaccgacgagcaggcgcagtaccactttttatcgggttttacctcaaaggtagcgggcaccgagctgggggtaaccgagcctagtcctactttctctgcctgctttggcgaggcgtttttatctttacaccctacggtttatgcgcgggaattgatcaagcgtatgcatgcgaatggcacgcaggcttatttggtgaatactggctggaacggcaaggggaagcgcatttcattgccagatactcgtgccataatcaacgccattatggatggctctatcgacagtgccccctgcgcgacattgccttattttaatttggcattccctacgcagttgtcaggggtagatagcgctatcttggacccgcaggtttctcataatgctggaggttgggatgtgcaggcgaaagcattggcaaaactatttgccactaattttaaaaaatataccagcgaagccttggggcagcacttacaagcggtagggccggcggggtttgaataa

SEQ ID NO: 1194 - protein, 551 aa, Saccharophagus degradans 2-40
MALNEQQTNFKIGAPFASDVSVFLANLGISASEIVRNPSYDMLYRNELDENLQGCERGILTKTGAVNVDTGVFTGRSPKDKYIVKDEKASANVWWPSDAASNDNHPMDQSTWTRLKAVCTNQLNNKPLYVVDAFCGASDDVRVSVRFVTEVAWQAHFVTNMFIRPTQAQLDAFTPDFVVLNASKAVNTQWQQQGLNSENFVAFNLTENMQLIGGTWYGGEMKKGMFSVMNYYLPLHGRASMHASANVGSDGDVAVFFGLSGTGKTTLSADPQRALIGDDELGWDDEGVFNLEGGCYAKTIDLSEQNEPDIFRAIRRDALLENVAVDANGEVDYSDVSKTQNTRVSYPIYHIPNCVKPVSRGGHARKIIFLTADAFGVFPPVSKLTDEQAQYHFLSGFTSKVAGTELGVTEPSPTFSACFGEAFLSLHPTVYARELIKRMHANGTQAYLVNTGWNGKGKRISLPDTRAIINAIMDGSIDSAPCATLPYFNLAFPTQLSGVDSAILDPQVSHNAGGWDVQAKALAKLFATNFKKYTSEALGQHLQAVGPAGFE

SEQ ID NO: 1195 - DNA, 1599 bp, Silicibacter sp. TM1040
  CDS (1)..(1599): transl_table=11
atgacatctggacgggtaaacccgaacttccgcctcgaggatcagggaatagagggtctgggcaatgtctattataacctcatggaaccggcccttgttcaagaagcgctcagccgtggcgaaggcaaccttggaaaagggggcgctttcctcgtcaccaccggcaagttcacgggtcgctcccccaaggacaaacatgtggtgaagacggcctctgttgccgatacgatctggtgggaaaacaacgccgaaatgagccccgagggctttgacgcgctttatgcggacatggtcgagcacatgaaaggccgcgactatttcgtgcaggatctcgtcgggggcgcggaccccgtgcacgcgatcaatgtgcgcatggtcaccgagctggcgtggcacaacctctttatccgccacctgctgcgtcgccccgaccgcgaagatctggatgacttcatcgccgatttcaccatcatcaactgcccctctttccaggcagaccccaataagcacaactgccgatccgaaaccgtgattgcgctgaacttcgatcgcaagatgatcctgatcggcggcaccgagtatgcgggtgagaacaagaaatccgtcttcacccttctgaactacctgctccccgaaaagggcatcatgccgatgcactgctcggccaaccatgccaagggcaacccggtcgacaccgccgtgttcttcggcctgtcaggcaccggcaaaaccacgctttcggcagacccggaccgcgtgctgatcggcgatgatgagcatggctgggcgtccaacggcaccttcaactttgagggcggctgttacgcgaagacgatcaacctcaaccccgaggcggagcctgagatttacgccacgaccgagaaattcggcaccgtgatcgagaacatgaccttcgatccggagacttttgatctcaacttcgatgatgacagcctgacggccaacatgcgctgcgcctacccgctgcattatatctcgaatgcatctgcttcggcgcgtggcggacatcccaagaacatcatcatgctcacctgtgatgcctttggcgtgctgcctccgattgcccgtctgacgccggcccaggcgatgtaccacttcctctccggcttcacttccaaggtcgccgggaccgagcgtggcgtcaccgagccggagcccacgttctccacctgctttggcgcgcccttcatgccgcgtcgccccgaggtctatggcaacctcctgcgcgaaaagatcgcggcccatggtgcaacctgctggctggtgaacaccggctggaccggcggcgcctatggcacgggttcccgcatgccgatcaaagcgacccgtgcgcttttgactgctgcgcttgatggctcgctggcaaatgcagagttccgcaaagatccgaactttggctttgacgtgccagtcgctgctcccggcgttgccgaagtgctgctcgacccgcgccgcacatgggacgacaaagccgcctatgacgcgcaggccgagaagctggtgcagatgttctctgacaacttcgaacagtacctgccctacatcgatgaggacgtgaaagcagccgccatctgctga

SEQ ID NO: 1196 - protein, 532 aa, Silicibacter sp. TM1040
MTSGRVNPNFRLEDQGIEGLGNVYYNLMEPALVQEALSRGEGNLGKGGAFLVTTGKFTGRSPKDKHVVKTASVADTIWWENNAEMSPEGFDALYADMVEHMKGRDYFVQDLVGGADPVHAINVRMVTELAWHNLFIRHLLRRPDREDLDDFIADFTIINCPSFQADPNKHNCRSETVIALNFDRKMILIGGTEYAGENKKSVFTLLNYLLPEKGIMPMHCSANHAKGNPVDTAVFFGLSGTGKTTLSADPDRVLIGDDEHGWASNGTFNFEGGCYAKTINLNPEAEPEIYATTEKFGTVIENMTFDPETFDLNFDDDSLTANMRCAYPLHYISNASASARGGHPKNIIMLTCDAFGVLPPIARLTPAQAMYHFLSGFTSKVAGTERGVTEPEPTFSTCFGAPFMPRRPEVYGNLLREKIAAHGATCWLVNTGWTGGAYGTGSRMPIKATRALLTAALDGSLANAEFRKDPNFGFDVPVAAPGVAEVLLDPRRTWDDKAAYDAQAEKLVQMFSDNFEQYLPYIDEDVKAAAIC

SEQ ID NO: 1197 - DNA, 1599 bp, Rubrobacter xylanophilus DSM 9941
  CDS (1)..(1599): transl_table=11
atggaccttgcggttcgtaagatgaccctcgaagggcttggggtctcgcaactcggcgcggtgcatgagaacctccccccggcgaggctcgtggaggcctcggtacgccgcagggagggcatgctggccgagaacggggccctggtgtgcctgaccggcaagcgcaccggccgctcgcccaaggaccgctttatagtcgagaacggcctcacccgggggcccgtggactggggcccggtgaacaagcccttccccggggagcggttcgagcggctgctcgccaaggcctcggcctatctcgagaacctcgaggaggtctacgtcgtcgacgcctacgccggggccgacccgcgctaccggctcaacgtccaggtggtctgcgagtacgcctggcaggcgctcttcacccgccagctcttccggcggccgtcccgcgaggagctggacgccttcgagccggactggaccgtcatctcggtgcccggcctcctcaccgacccggaggaggacggcacggagtccgagaccttcgtcgggatagacttcgggcggcgggtggtgctcatctgcggcacgcgctacgcgggcgagatcaagaagagcatcttctcggtgctgaacttcgtgctgcccaccgagcacggggtcttccccatgcactgctcggccaacgtggggcccgggggggacgtcgcgctctttttcggtctctccgggacgggcaagaccaccctctcctcggaccccgagcgctacctcatcggcgacgacgagcacggctggtctgacgaggggatcttcaacttcgagggcggctgctacgccaagtgcatagacctctcccgggagaaggagccccagatctacgacgccatccgcttcggggcggtcctggagaacgtggtggtggacaggatcacgcgccgggtggactactccgacgcctcgctcaccgagaacacccgggccgcctaccccctggagtacatcgagggggcggtggattccggccgggcggggcacccggccgcggtgctcttcctcaccgccgacgccttcggggtgctcccccccataagcgtcctctcgcccgagcaggccgcctactacttcctctccggctacacggcgaagctcgccggcaccgaggcggatatggaggccgacgtggaggccaccttctccgcctgcttcggggcacccttcctccccctgccggccaccacctacgccgccatgctctccgagaagctccgcgagcacggctcccgctgctacctcatcaacaccggctggtccggcggcccctacggcgtgggggagcgggtggacatcgcggcgacgcgccagatggtccgggccgtcatcgccggaaacatcgacgagtccaagacctataccgacccgttcttcgggctccaggtgccgctcgaggtgcccggggtcccctccggtatcctcaacccccgcgagacctgggccgacagggccgcctacgacgaccaggccgcaaagctcgccgacctcttccgcgagaacttcaagaagttcgaggatggggtgcccgaaggggtgcgtaaggccggacccaacgtctag

SEQ ID NO: 1198 - protein, 532 aa, Rubrobacter xylanophilus DSM 9941
MDLAVRKMTLEGLGVSQLGAVHENLPPARLVEASVRRREGMLAENGALVCLTGKRTGRSPKDRFIVENGLTRGPVDWGPVNKPFPGERFERLLAKASAYLENLEEVYVVDAYAGADPRYRLNVQVVCEYAWQALFTRQLFRRPSREELDAFEPDWTVISVPGLLTDPEEDGTESETFVGIDFGRRVVLICGTRYAGEIKKSIFSVLNFVLPTEHGVFPMHCSANVGPGGDVALFFGLSGTGKTTLSSDPERYLIGDDEHGWSDEGIFNFEGGCYAKCIDLSREKEPQIYDAIRFGAVLENVVVDRITRRVDYSDASLTENTRAAYPLEYIEGAVDSGRAGHPAAVLFLTADAFGVLPPISVLSPEQAAYYFLSGYTAKLAGTEADMEADVEATFSACFGAPFLPLPATTYAAMLSEKLREHGSRCYLINTGWSGGPYGVGERVDIAATRQMVRAVIAGNIDESKTYTDPFFGLQVPLEVPGVPSGILNPRETWADRAAYDDQAAKLADLFRENFKKFEDGVPEGVRKAGPNV

SEQ ID NO: 1199 - DNA, 1611 bp, Mesorhizobium sp. BNC1
  CDS (1)..(1611): transl_table=11
atgcaagagaccggcctccgcaaccccaccaacggcatcgagaccagtggtttgaagaccagcgggaccgttttcttcaatctcaccgagccgcaactttatgaggaggcgatccggcgcgccgaggcgcggatttccgctcacggggccctcgttgccgagacgggacagcacaccggccgctcgcccaaggacaagttcattgtgcgagatgccagcacggaaaacgagatctggtgggacaacaataagccgctatcgggcgaacattttgaagcactctacgaggacttcaagcgtcacgccgagagccttgaccttttcgtacaggatctcgtcggcggggctgatccggaaaacgcgctgccggtgcgcgtcgtcacggaatatgcctggcattcgctcttcatccgcaatctgctgatccgcccgatgcgctcggagctcaagagcttcgtgccgcagatgacggtgatcgatctgccgtccttccgcgccgatccgaagcggcatggctgccgcacggaaaccattatcgcgatggatctgaagcgcatgatcgtgctgatcggcggcacgtcctatgcgggggaaatgaaaaaatccgtcttcactgcgctcaattacctgcttccggccaagggcgtgatgcccatgcactgctcggccaatgagggatccgagggcgacgttgcgatcttcttcggcctgtcgggcacgggaaagacgaccctttccgccgaaccttcgcgcacgcttatcggcgatgacgagcacgggtgggggccgcacggcatcttcaatttcgaaggcgggtgctacgccaagacgatcaagctcagccgggaggcggagccggagattttcgccaccacggaacgcttcggcacggtgctggaaaatgtggtcgtcgacgagcacggcgttcccgatttcgacgatggcagccggaccgagaacacgcgctgcgcatatccgctgcacttcatctccaatgccagcgagacgggcagggcagggcagccaaagaacgtcatcatgctgacggcggatgcctttggcgtgatgccacccatcgccaagcttacccctgcccaggccatgtaccatttcctgtcgggctacacggcgaaagtggcgggaacggaaaaaggcgtcaccgagccggaggccaccttctccacctgtttcggcgcacccttcatgccccgccatccttcggtctacggaaatcttctcagagacctgatcgcagagcacgaggtcgactgctggctagtcaatactggttggaccggcggcgcctacggcactggccaccgcatgcccatcaaggtgacacgcgccctgctctccgctgcactcgacggctcgcttcgaacagcccagttccgtaccgaccccaattttggctttgccgtacccgtggcggtgccgggcgtagacggcaccatcctcgatccgcgctcaacctgggcagataaggccgcctatgatgtgcaggccgagcggcttgtttccatgttcgtcgccaatttcgggaaattcgagaatcacgtggaagcagacgtgatgaatgcatcgcctcagatccggcaggctgctgaatag

SEQ ID NO: 1200 - protein, 536 aa, Mesorhizobium sp. BNC1
MQETGLRNPTNGIETSGLKTSGTVFFNLTEPQLYEEAIRRAEARISAHGALVAETGQHTGRSPKDKFIVRDASTENEIWWDNNKPLSGEHFEALYEDFKRHAESLDLFVQDLVGGADPENALPVRVVTEYAWHSLFIRNLLIRPMRSELKSFVPQMTVIDLPSFRADPKRHGCRTETIIAMDLKRMIVLIGGTSYAGEMKKSVFTALNYLLPAKGVMPMHCSANEGSEGDVAIFFGLSGTGKTTLSAEPSRTLIGDDEHGWGPHGIFNFEGGCYAKTIKLSREAEPEIFATTERFGTVLENVVVDEHGVPDFDDGSRTENTRCAYPLHFISNASETGRAGQPKNVIMLTADAFGVMPPIAKLTPAQAMYHFLSGYTAKVAGTEKGVTEPEATFSTCFGAPFMPRHPSVYGNLLRDLIAEHEVDCWLVNTGWTGGAYGTGHRMPIKVTRALLSAALDGSLRTAQFRTDPNFGFAVPVAVPGVDGTILDPRSTWADKAAYDVQAERLVSMFVANFGKFENHVEADVMNASPQIRQAAE

SEQ ID NO: 1201 - DNA, 1617 bp, Haemophilus somnus 129PT
  CDS (1)..(1617): transl_table=11
atgactgacttaaacaaagtaataaatgaattaggtgaattaggcatctatgatgtaaaagagattgtccataatccgagttatgaacaactttttgaagaagaaaccaaaccgggtttagcgggcttcgagaaaggtgttgttaccacttcaggtgcggttgcggtagatacgggaatttttaccggtcgttcgccaaaagataagtacattgttttagatgaaaaaacaaaaaatacggtatggtggacgagcgatgcggcgaaaaacgacaataagccgatgaaccaagaaacttggcaaagtttgaaagggttggtcaccaaacagctttccggcaagcgtttgtttgttatcgacgctttttgcggagcaaaccctgatacacgtttagcagtgcgtattgttactgaagttgcatggcaggcacattttgtaaaaaatatgtttattcgtccgtctgatgaagaattgcaaaatttcaaaccggactttacggttatgaacggttctaaagtaactaacccgaattggaaagagcaaggattaaattcagagaactttgtggcatttaacattactgagggcgttcaattaatcggcggtacttggtacggcggtgaaatgaaaaaagggatgttctcaatgatgaactacttcttaccattaaaaggtatcgcctcaatgcactgttctgcaaacgtaggcaaagatggcgatgtggcgattttcttcggcctatccggtacaggtaaaacaacgctttcaaccgatccgaaacgtcaattaatcggtgatgatgaacatggctgggatgatgacggtgtcttcaactatgaaggtggttgttatgcaaaaacaatcaaactttccgcagaaagcgagcctgatatttatcgtgcaatcagacgtgatgcgttgttagaaaatgttgtcgttcgtgaggatggttccgttgactttgatgacggttcaaaaacggagaatactcgtgtatcttatccaatttaccacattgacaatattgttaaaccggtatcaaaagcaggacatgcaacaaaagttatcttcttaacggcagatgcgttcggtgtcttacctccggtttcaaaactcacacctgaacaaactaaatactacttcttatccggtttcactgcaaaattagctggtacagagcgtggcattactgagccgacgccaacattctctgcctgtttcggtgcggcattcttaagtttgcacccaacccaatacgcagaagtgttggtaaaacgtatgaaagattctggtgctgaagcgtacttagtcaatacaggttggaacggtacaggtaaacgcatctcaattaaagatactcgtggcattatcgacgctatcttagacggctcaattgaaagtgcggaaatgggatcattaccaatcttcgatttggccattccaaaagcattaccaggtgttgatcctgcaatcttagatcctcgtgatacttatgcggataaagcacaatggcaagcaaaagcggaagaccttgcaagtcgtttcgtgaaaaactttgaaaaatatgctacaaatgaagaaggaaaagcacttattgcggcaggtcctaaagcttaa

SEQ ID NO: 1202 - protein, 538 aa, Haemophilus somnus 129PT
MTDLNKVINELGELGIYDVKEIVHNPSYEQLFEEETKPGLAGFEKGVVTTSGAVAVDTGIFTGRSPKDKYIVLDEKTKNTVWWTSDAAKNDNKPMNQETWQSLKGLVTKQLSGKRLFVIDAFCGANPDTRLAVRIVTEVAWQAHFVKNMFIRPSDEELQNFKPDFTVMNGSKVTNPNWKEQGLNSENFVAFNITEGVQLIGGTWYGGEMKKGMFSMMNYFLPLKGIASMHCSANVGKDGDVAIFFGLSGTGKTTLSTDPKRQLIGDDEHGWDDDGVFNYEGGCYAKTIKLSAESEPDIYRAIRRDALLENVVVREDGSVDFDDGSKTENTRVSYPIYHIDNIVKPVSKAGHATKVIFLTADAFGVLPPVSKLTPEQTKYYFLSGFTAKLAGTERGITEPTPTFSACFGAAFLSLHPTQYAEVLVKRMKDSGAEAYLVNTGWNGTGKRISIKDTRGIIDAILDGSIESAEMGSLPIFDLAIPKALPGVDPAILDPRDTYADKAQWQAKAEDLASRFVKNFEKYATNEEGKALIAAGPKA

SEQ ID NO: 1203 - DNA, 1650 bp, Alkalilimnicola ehrlichei MLHE-1
  CDS (1)..(1650): transl_table=11
atgaatacgactctaaatgggcagcccgacaccccccaaaaaacgaggagcttgcacgtgacgttctccctggcaaagcacggcatcgaggtggcggaagtcctgcgcaaccccgccccggcgcggctctatgaagaggccctggcccacgagaagggctcggccatctcttccaccggcgcgctgatcgcccgctccggcgaaaagaccggacgcagccccaaggacaaacgggtggcccaccacccggaggtcaccgacgatgtctggtggggggacgtgaacatcgaaatggaaccggacagcttcgatgccctgcagcagcaggcggtgaactatctgaacacccgtgaccgactctatgtgatcgacgcctacgccggttgggacccacgttaccgggtgaaggtaagggtgatttgcgagcgggcctaccacgccctgttcatgcacaacatgctgatccggcccaaccgggaggagctggccgatttcggcgagcccgattacaccatctacaacgccggccggttggcggccaaccaggagctccccggcgtcacctccagcaccagcgtcagcctctgcctgagccggggtgagttcgtgatcctgggtacggaatacgccggcgagatgaaaaagggcgtgttcaccatcatgaactacatcatgcccaagcagggcgtgctctccatgcactgctcggccaacgaggggcatgacggtgatgtctcggtcttcttcggcctgtcgggcaccggcaagaccaccctgtcggccgacccgcgccgccggctgatcggcgacgatgagcactgctggaccgacgagggggtgttcaacatcgagggcggctgctacgctaaggccatcggcctggacccgcgcgccgagcccgagatctacaacgccatccgcttcggcgccgtgctggagaacgtggtctacgacccggtcacccgggaggtggactaccacgacgggtccatcaccgagaacacccgctgctcctaccccatcgagttcatccccaacgcccggctgccctgcgtgggggggaccccgaagaacgtcatcttcctgacctgtgacgccttcagcgtgctgccgccggtgagcaaacttaccccggcccaggccatgtaccacttcatcagcggttacactgccaaggtggcgggcacggagatgggggtcaccgaaccccaggccaccttctccgcctgcttcggtgctcccttcctggtgctgcacccgacccactacgcggaactgctggccgagaagatccgcgccaccggtgtccaggtctggctggtgaacaccggctggactggcggcccctacggcgagggccgccgcatgagcctggcccacacccgcgccatcatcgacgccatccatgacggctcgctgaaggaccaggagaccgtgaccgaccccaccttcggtgtgcaggtgcccctgcagtgccacggcgtgccggacgaggtgctgatcccggcgaagacctgggccgacccggccgcctatgaggagatggcccagcacctggccgggctgttccacaagaacttccaggcctacgccgaccaggccagcccggagatcgtggccgccgcgccgcgggtgggcgaaatggcctaa

SEQ ID NO: 1204 - protein, 549 aa, Alkalilimnicola ehrlichei MLHE-1
MNTTLNGQPDTPQKTRSLHVTFSLAKHGIEVAEVLRNPAPARLYEEALAHEKGSAISSTGALIARSGEKTGRSPKDKRVAHHPEVTDDVWWGDVNIEMEPDSFDALQQQAVNYLNTRDRLYVIDAYAGWDPRYRVKVRVICERAYHALFMHNMLIRPNREELADFGEPDYTIYNAGRLAANQELPGVTSSTSVSLCLSRGEFVILGTEYAGEMKKGVFTIMNYIMPKQGVLSMHCSANEGHDGDVSVFFGLSGTGKTTLSADPRRRLIGDDEHCWTDEGVFNIEGGCYAKAIGLDPRAEPEIYNAIRFGAVLENVVYDPVTREVDYHDGSITENTRCSYPIEFIPNARLPCVGGTPKNVIFLTCDAFSVLPPVSKLTPAQAMYHFISGYTAKVAGTEMGVTEPQATFSACFGAPFLVLHPTHYAELLAEKIRATGVQVWLVNTGWTGGPYGEGRRMSLAHTRAIIDAIHDGSLKDQETVTDPTFGVQVPLQCHGVPDEVLIPAKTWADPAAYEEMAQHLAGLFHKNFQAYADQASPEIVAAAPRVGEMA

SEQ ID NO: 1205 - DNA, 1599 bp, Solibacter usitatus Ellin6076
  CDS (1)..(1599): transl_table=11
atgcagaatctaggtattcttcccagccgttacggtctccaggaacacggcattcgcaacgccagcttcgtgtattggaatctggggacggctcagctggtcgagaaggccatccagcgccgcgagggcctgctggcttccggcgggggactcgtggtgcgcaccggcgatcagaccggccgttcgccgcgcgataaattcgtggtccgcgacgccggcaccgagaacaccgtgaactggggcagcgtaaaccagcccttcctccccgagcagttcgaccgcctctacggaaaactgctcgcctacctgcaggcgcgcgacctcttcgtgcaggattgctacgccggcgccgacccgcagtatcagattccgatccgcgtcatcaccgagctcgcctggcacaaccttttcgcgcgccagctcttcgtgcgcgcccaccccgaaaagaccgatagccatgtcccgcagtttaccgtcatcgatgcgccgggcttccgcgccgaagcgaccgacgacggcacgaattcggacgttttcgtgatcatcaatttcagcaagaagctggtgatcatcggcggcactcaatacgccggcgaaatgaagaaggccatcttcagcgtgctgaactactacctgcccacgcaggacgtgcttcccatgcattgctccgcgaacatcggcaccgataacgagaccgcgcttttcttcggcctctccggcaccggcaagaccacactgtccgccgacccctcccgccgcctgattggcgacgacgagcatggctgggcgcccagcggcgtcttcaatttcgaaggcggctgctacgccaagtgcatccggctgcggcacgaaaccgagccgcagatctgggacgcgatccgcttcggcacggtgctcgagaacgtcgccgtggatagcgagctccgcctgctcgattacgacgacaccaccttcacggaaaatacgcgcgcggcctacccggtcacgttcatcgaaaacgcggtcctgcccggactcggcggacatcccaagaacatcgtcttcctcacctgcgatgccttcggcgtcctgcctccgctctcccgccttacgcccgaccaggcgatgttccacttcctaaacggctacaccgccaaagtcgcgggcaccgaacgcggactcggcaaagagcccgaagccaccttcagctcctgctttggatcgcccttcctgccccgcaatcctgaggtttacgcggagatgctcggcaggaagatgacccagcaaggcgctgcctgctggctgatcaacaccgggtggagcggcggcccttacggcgtcggcaatcgcatgagcctcccgatcactcgcgcactggttacggaagcgctcagcggcgcgctggccaaggccgattaccgcatcgacccggtcttcaaggttcaggtcccggtggcctgccccaatgtggactccaaggcgctcgatccgcgcgccacctggagcgatcccaaagcctacgacaaggccgccgatgacctggccgcgcgctttcgcaaaaacttcgccaaattcgaaaaggccggcggcattctgaagtgcgaagaagtactggcgtaa

SEQ ID NO: 1206 - protein, 532 aa, Solibacter usitatus Ellin6076
MQNLGILPSRYGLQEHGIRNASFVYWNLGTAQLVEKAIQRREGLLASGGGLVVRTGDQTGRSPRDKFVVRDAGTENTVNWGSVNQPFLPEQFDRLYGKLLAYLQARDLFVQDCYAGADPQYQIPIRVITELAWHNLFARQLFVRAHPEKTDSHVPQFTVIDAPGFRAEATDDGTNSDVFVIINFSKKLVIIGGTQYAGEMKKAIFSVLNYYLPTQDVLPMHCSANIGTDNETALFFGLSGTGKTTLSADPSRRLIGDDEHGWAPSGVFNFEGGCYAKCIRLRHETEPQIWDAIRFGTVLENVAVDSELRLLDYDDTTFTENTRAAYPVTFIENAVLPGLGGHPKNIVFLTCDAFGVLPPLSRLTPDQAMFHFLNGYTAKVAGTERGLGKEPEATFSSCFGSPFLPRNPEVYAEMLGRKMTQQGAACWLINTGWSGGPYGVGNRMSLPITRALVTEALSGALAKADYRIDPVFKVQVPVACPNVDSKALDPRATWSDPKAYDKAADDLAARFRKNFAKFEKAGGILKCEEVLA

SEQ ID NO: 1207 - DNA, 1620 bp, Solibacter usitatus Ellin6076
  CDS (1)..(1620): transl_table=11
atgctgattgaacacaagcagattgcgaatgcggggattcggccaagccgccacggtctcgaacagcagggattccggaatctgaatgtcgcttactggaacctcggcacggcgcaactgctggaacacgcgatccagcggagggaaggctccttcgccagcggcggctcgttcgtagtccgcaccggccagttcaccgggcgctcgcccaaggataaattcattgtgcgcgatgagatcaccgatgcgcacgtgcattgggggccggtcaaccagccgctctccgaagcgcatttcgaccgcctgtataccaaaatgatggcgttctggcagggccacgacgtctatgtgcaggattgctatgtgggcgccgaccgcgagctcggcatgccgatccgggtggtcagccagctggcctggcacaacctgttcgcgcggcagttgttcatacggcccgatccggagctgaccggcgagcacaagccgcagttttcgattttcttcgcgccggacttccaggccaatccggccgaggatgggaccaactcggagacgtgcatcgtcatcaatttcaagaaaaaggtggtgctgatctgcggcacgagctacgccggggagatgaagaaatccgccttcacgatcatgaactacctgctgccggggcagggagttttccccatgcactgctcttcgaacatgggcgcggcgggcgataccgcgctcttcttcggactctcgggcaccggcaagaccacactctccgcggacccggagcgccgcctgatcggcgacgatgagcacggctggagcgacaacggcgtcttcaatttcgagggcggctgctacgccaagtgcatccggctctcggccgaaaacgagccgcagatctggaatgcgatccgcttcggcaccgtgctcgagaacgtcgcgatggattcggaaacgcggctgctcgatttcaactccgatgaagtcacggagaatacgcgtgccgcctacccgctgaagttcatcgagggcgcgatcattccgagcgtgggcggccatccgaatcacgtgatctttttgaccgccgatgccttcggcgtgctgccgccgatttcgaagctgactccggagcaggccatgtaccacttcctcagcgggtacacggcgaaggtcgccggtacggagcgcggcctcggcaaggagccgcaggccacgttcagcgcgtgcttcggcgcgcccttcctgccgcgtccggccgctgcttacgcgtccctgctcggcgagaaactccggcgccacggagcgcaggtctggttggtgaataccggctgggtaggcggcccttacggcgtgggagagcgcatgaagctgcgttacacgcgcgcgatgctgcaggccgcgttaagcggtcaactcaacgatgtggccacggagcagcacccgatcttcggcgtggccgtgcccaagagctgcccgaatgttccggcaaccttcttggatgcgcgtgggatgtggagcgataagacggcgtacgatcgcgcagcgcaggatctggcctcgcgtttcaacaagaacttcgaaaagttcagcggcgtcagccccgagattgccgcggcggctccaggtaaataa

SEQ ID NO: 1208 - protein, 539 aa, Solibacter usitatus Ellin6076
MLIEHKQIANAGIRPSRHGLEQQGFRNLNVAYWNLGTAQLLEHAIQRREGSFASGGSFVVRTGQFTGRSPKDKFIVRDEITDAHVHWGPVNQPLSEAHFDRLYTKMMAFWQGHDVYVQDCYVGADRELGMPIRVVSQLAWHNLFARQLFIRPDPELTGEHKPQFSIFFAPDFQANPAEDGTNSETCIVINFKKKVVLICGTSYAGEMKKSAFTIMNYLLPGQGVFPMHCSSNMGAAGDTALFFGLSGTGKTTLSADPERRLIGDDEHGWSDNGVFNFEGGCYAKCIRLSAENEPQIWNAIRFGTVLENVAMDSETRLLDFNSDEVTENTRAAYPLKFIEGAIIPSVGGHPNHVIFLTADAFGVLPPISKLTPEQAMYHFLSGYTAKVAGTERGLGKEPQATFSACFGAPFLPRPAAAYASLLGEKLRRHGAQVWLVNTGWVGGPYGVGERMKLRYTRAMLQAALSGQLNDVATEQHPIFGVAVPKSCPNVPATFLDARGMWSDKTAYDRAAQDLASRFNKNFEKFSGVSPEIAAAAPGK

SEQ ID NO: 1209 - DNA, 1617 bp, Magnetococcus sp. MC-1
  CDS (1)..(1617): transl_table=11
atgtccagcactttgacctataaagaacgcgtcgcagccgtcaccaaacagttggcggaacggggaatcagcaaccctggcgtcgtcaacctggatctccccacccccaaactctatgagcagattatcgcccgcggtgaagggcagattgcccacggtggttcggtcgtggtggagacaggcatctataccggtcgttctgccaaagataaatttattgtggaggagcctaccagtcaggcggatgtggattggggcacggttaaccgtcctgtttcccaagaaaattatgaaaaggtgcgcggtcgcttgatggcgtttttacaaggtcgggagctgtttgtacaagatgtgcgggttggtgccgatcctcaatttcagcgccgggtgcgggtggttaacattaaagcgtggcaaaatctgtttgcacgtaacctgtttatcacccctgagaccatggaaaatgaggttgttccccccgattttaccgtcattgcctgccccgattttaaggccgatcctgaactggatggcacccgttccgaagcctttatctacatgaacattgcccagcgcgagatcattattggtggtacggcctatgcgggagagatgaaaaagtcgatcttctccatcatgaactatctgctgcctaagcaggccgtgttccccatgcactgtagcgccaatatcggcacacaagatgatgtggccatcttctttggcctctctggtaccggcaaaaccactctctccaccgatcccaaacgccgtatgattggcgatgatgagcatggctggtccgataaaggggtgtttaactttgagggtggctgctacgccaagaccattcgtttgaacgccgtggccgagccggttatccataactgtacccaaacctttggtaccgtcttggaaaatgtggtgatggatgaggagagccgtaccctggacttggatgacgaccgcaagaccgaaaatacccgtgccgcttatcctttaagctcggtgggtaacattaaggctgacggtatggggggtcatcccagccatgtgattctgctaacggcggatgcctttggggtactccccccggtctcgcgtcttacctctgagcaggccatgtaccactttatctccggctataccgccaagctggccggtactgagcggggcgtcaaagagccccaagccaccttctcatcctgttttggtggcccgttcatggttcaccaccccacagtctatgctgaaatgctgggtaaacggctgagcgagaccggtgccaagtgctggttggtgaataccggctggaccgcaggcccttatggtgaagggcatcgcatgcccatccgcgaaacccgcgccatcattgacagcattttggccaatgagctcaacgatgtggctacccatgaagaccctgtctttgggctggccgtgcccaccgccattgatggggtggaaaccgtacgtctgacccctcgtgatacctggaaagatggtgcggcctttgatgccaaggccaaagatctggcccgtcagtttaatgaaaattttgccaactttgctgatcgcgtctccgatgccatcaagggtgctggtcccaaggtgtaa

SEQ ID NO: 1210 - protein, 538 aa, Magnetococcus sp. MC-1
MSSTLTYKERVAAVTKQLAERGISNPGVVNLDLPTPKLYEQIIARGEGQIAHGGSVVVETGIYTGRSAKDKFIVEEPTSQADVDWGTVNRPVSQENYEKVRGRLMAFLQGRELFVQDVRVGADPQFQRRVRVVNIKAWQNLFARNLFITPETMENEVVPPDFTVIACPDFKADPELDGTRSEAFIYMNIAQREIIIGGTAYAGEMKKSIFSIMNYLLPKQAVFPMHCSANIGTQDDVAIFFGLSGTGKTTLSTDPKRRMIGDDEHGWSDKGVFNFEGGCYAKTIRLNAVAEPVIHNCTQTFGTVLENVVMDEESRTLDLDDDRKTENTRAAYPLSSVGNIKADGMGGHPSHVILLTADAFGVLPPVSRLTSEQAMYHFISGYTAKLAGTERGVKEPQATFSSCFGGPFMVHHPTVYAEMLGKRLSETGAKCWLVNTGWTAGPYGEGHRMPIRETRAIIDSILANELNDVATHEDPVFGLAVPTAIDGVETVRLTPRDTWKDGAAFDAKAKDLARQFNENFANFADRVSDAIKGAGPKV

SEQ ID NO: 1211 - DNA, 1584 bp, Fusobacterium nucleatum subsp. vincentii ATCC 49256
  CDS (1)..(1584): transl_table=11
atgaaaatgtatggacttgaaaaattaggaattagtaatgtaacagctgctcactataatttgagccctgcacagcttgtagaaaaagctttggcaaataacgaaggaacattgagtgatactggtgcctttgttataacaactggaaaatacactggtcgtgcaccagatgataaattttttgtggacactccaaaagttcataaatatattgattggagtagaaatcaacctattgaaaaagaaaaatttgatgcaatttttgggaaattagttgcttatttacagaatcgtgaaatttttatttttgatggaagagctggagctgatttggaatatactagaagatttcgtattataaatgaattagctagtcaaaatttatttattcatcaactattaattagaacaaatgaagaatataatgaaaataataatattgactttactattatttctgcacctaacttccactgtgtacctgaaatagatggagttaattcagaagctgctataataattgattttgaaagtaaattagctattatttgtggtactagatattcaggagaaatcaaaaaaagtgtattctctataatgaactatatcatgcctcatgaaaatattttacctatgcactgttcagcaaatatggatccagtaactcatgaaactgcaattttctttggattatctggaactggtaaaacaactctatcagctgatcctaatcgtaaattgataggtgatgatgaacatggttggtgtgataaaggaatttttaactttgaaggtggatgttatgcaaaatgtataaatctaaaagaagaaagtgaacctgaaatttatcatgcaattaaatttggaagtttagtagaaaatgttactctaaatcctaaaacaagaaaaattaattatgaagatgcaagtataacaccaaatacaagggtaggataccctatacattatatccctaatgcagaattatcaggggtaggtggtataccaaaagtagttatatttttaacagcagattcttttggagtattgcctccaatttcaagattaagtcaagaagctgcaatgtaccactttgtaactggatttactgcaaaactagctggaacagaattaggtgttaaagaaccagtccctacattctcaacttgttttggagaaccatttatgcctatggatccaagtgtatatgctaaaatgcttggagaaagattagaaaaacataatacaaaagtgtatttaatcaatactggttggtctggtggagcctatggaacaggtaaaagaataaatttaaaatatactcgtgctatggtaacagctgtattagaaggatattttgataatgctgaatataaacatgatgaaatatttaatttagatattcctcaatcttgtccagatgttcctagtgaaattatgaatccaatagatacttgggcagatagagataaatatattgtagcagctaaaaaattagctaacttattctataataactttaaagaaaaatatccaaatatgccagaaaatatcactaatgctggtcctagatataatgactaa

SEQ ID NO: 1212 - protein, 527 aa, Fusobacterium nucleatum subsp. vincentii ATCC 49256
MKMYGLEKLGISNVTAAHYNLSPAQLVEKALANNEGTLSDTGAFVITTGKYTGRAPDDKFFVDTPKVHKYIDWSRNQPIEKEKFDAIFGKLVAYLQNREIFIFDGRAGADLEYTRRFRIINELASQNLFIHQLLIRTNEEYNENNNIDFTIISAPNFHCVPEIDGVNSEAAIIIDFESKLAIICGTRYSGEIKKSVFSIMNYIMPHENILPMHCSANMDPVTHETAIFFGLSGTGKTTLSADPNRKLIGDDEHGWCDKGIFNFEGGCYAKCINLKEESEPEIYHAIKFGSLVENVTLNPKTRKINYEDASITPNTRVGYPIHYIPNAELSGVGGIPKVVIFLTADSFGVLPPISRLSQEAAMYHFVTGFTAKLAGTELGVKEPVPTFSTCFGEPFMPMDPSVYAKMLGERLEKHNTKVYLINTGWSGGAYGTGKRINLKYTRAMVTAVLEGYFDNAEYKHDEIFNLDIPQSCPDVPSEIMNPIDTWADRDKYIVAAKKLANLFYNNFKEKYPNMPENITNAGPRYND

SEQ ID NO: 1213 - DNA, 1617 bp, Haemophilus influenzae R2846
  CDS (1)..(1617): transl_table=11
atgacagacttaaataaagtggtaaaagaacttgaagctcttggtatttatgacgtaaaagaagttgtttacaatccaagctacgagcaattgttcgaagaagaaactaaaccaggtttagaaggctttgaaaaaggtactttaactacgactggtgcagtggcagtagatacaggtatcttcacaggtcgttctccaaaagataaatatatcgtgttagatgaaaaaaccaaagatactgtttggtggacatctgaaacagcaaaaaacgacaacaagccaatgaaccaagctacatggcaaagcttaaaagacttggtaaccaaccaactttctcgtaaacgcttatttgtagttgatggtttctgtggtgcgagcgaacacgaccgtattgcagtacgtattgtcactgaagtagcgtggcaagcacattttgtaaaaaatatgtttattcgcccaactgaagaacaactcaaaaattttgaaccagatttcgttgtaatgaatggttctaaagtaaccaatccaaactggaaagaacaaggtttaaattcagaaaactttgttgctttcaacttgactgaacgcattcaattaatcggcggtacttggtacggcggcgaaatgaaaaaaggtatgttctcaatgatgaactacttcctacctctcaaaggtgttggtgcaatgcactgctcagctaacgttggtaaagatggcgatgtagcaatcttcttcggcttatctggcacaggtaaaacaaccctttcaacggatccaaaacgtgaattaatcggagatgatgaacacggttgggatgatgttggtatctttaactttgaaggtggttgctatgcgaaaaccattcatctttcagaagaaaatgaaccagatatttaccgcgctatccgtcgcgacgcattattagaaaacgtggttgttcgttcagatggttctgttgatttcgatgatggttcaaaaacagaaaatactcgcgtgtcttacccaatttatcacatcgataacattgtaaaaccagtttctcgtgcaggtcacgcaactaaagttattttcttaactgcagatgcatttggcgtattaccaccagtatctaaattgacaccagaacaaactaaatactacttcttatctggtttcacagcgaaattagcaggtactgaacgtggtattactgaaccaactccaactttctcagcatgtttcggtgctgcgttcttaacccttcacccaactcaatatgctgaagtgttagtaaaacgtatgcaagcagcgggtgctgaagcttacttagtgaatactggttggaatggcacaggcaaacgtatctcaatcaaagatactcgcggaatcattgatgcaatcttagatggctcaattgaaaaagctgaaatgggcgaattgccaatcttcaacttagcaattcctaaagcattaccaggtgtagattctgcaatcttagatcctcgcgatacttacgcagataaagcacaatggcaatcaaaagctgaagacttagcaggtcgttttgtgaaaaactttgttaaatatgcaactaacgaagaaggcaaagccttaattgcagctggtcctaaagcttaa

SEQ ID NO: 1214 - protein, 538 aa, Haemophilus influenzae R2846
MTDLNKVVKELEALGIYDVKEVVYNPSYEQLFEEETKPGLEGFEKGTLTTTGAVAVDTGIFTGRSPKDKYIVLDEKTKDTVWWTSETAKNDNKPMNQATWQSLKDLVTNQLSRKRLFVVDGFCGASEHDRIAVRIVTEVAWQAHFVKNMFIRPTEEQLKNFEPDFVVMNGSKVTNPNWKEQGLNSENFVAFNLTERIQLIGGTWYGGEMKKGMFSMMNYFLPLKGVGAMHCSANVGKDGDVAIFFGLSGTGKTTLSTDPKRELIGDDEHGWDDVGIFNFEGGCYAKTIHLSEENEPDIYRAIRRDALLENVVVRSDGSVDFDDGSKTENTRVSYPIYHIDNIVKPVSRAGHATKVIFLTADAFGVLPPVSKLTPEQTKYYFLSGFTAKLAGTERGITEPTPTFSACFGAAFLTLHPTQYAEVLVKRMQAAGAEAYLVNTGWNGTGKRISIKDTRGIIDAILDGSIEKAEMGELPIFNLAIPKALPGVDSAILDPRDTYADKAQWQSKAEDLAGRFVKNFVKYATNEEGKALIAAGPKA

SEQ ID NO: 1215 - DNA, 1587 bp, Bacillus cereus G9241
  CDS (1)..(1587): transl_table=11
atgagtactgtgaatgtccaaattggtttacacgaattattgaacggaagcaatgcacagattcaactaagtgttccgcaattagtggaaaaagtattaatgcgaaatgaagggaaattaacttcgactggtgccgtttctgcttcaactggaaaatatacaggacgttctcctaaagataaatttattgtgaaagaagcatcggttgctgacaaaattgcttggggagctgtgaaccaaccgatttctgaagaacattttaataaattatatactaaagttttagaatacttaaaagaaaaagaagagttattcgtcttcaaaggatttgcaggcgctgaccgcaattaccgcctaccaattcaagttattaacgaatatgcatggcacaacttatttgtacatcaattattcattcgtccaactgaagaagaattaacaactcatgaatcagagttcacaattgtttctgcaccgaatttcaaagctgatccagctgttgacggtacaaactctgaagcattcattatggtttcattcgaaaaacgtatcgtactaattggtggtacagaatacgctggagaaatgaaaaaatcaatcttctctattatgaacttcttattacctgaacaagatatcctttctatgcattgctctgcaaacgtaggtgaagaaggcgacgtagcactattcttcggtttatctggaacaggtaaaacaacattatctgctgatccaaaccgtaaattaatcggtgatgatgagcacggttggtctgataacggtgtattcaacattgaaggcggttgctacgcaaaatgtgtaaacctttctcacgagaaagaaccacaaattttcgatgcaatcacatttggatctgttttagaaaacgttatcattaatgaccaaacgcgtatcgcagactataacgatactactttaacagaaaatactcgtgctgcataccctatgcatgcgatcgacaatatcgtactgccaagtgttgcaggacacccaaatacaatcatcttcttaactgctgatgcatcaggcgtattgcctccaatcagtaagttatcaaaagaacaagctatgtaccatttcttaagtggttacactagtaaactagcaggaacagagcgcggcgttacatctccgcaagcaacattctcaacttgcttcggttcaccattcttaccacttgatgcatctcgctatgctgaaatgcttggtgaaaaaatcgagaaacacgatgcgaaagtattcttagtaaacactggctggactggtggcgaatacggcgttggtaaacgtatgaacttaggttacactcgtgcaatgattcaatcagcattaagcggtgaacttgcgaaaactgaaaccgctaaacatgacatctttggtcttgaagttccacttcacgtaccaggtgtacctgacgaagtgttaatgcctgaacaaacttgggctgataaagctgcttacaaagcaaaagcaatcgaacttgcaaatgaattcaaagctaacttcaaaaagttcgacagcgtatctgaagatattattaacttaggcggcccaatcgcttaa

SEQ ID NO: 1216 - protein, 528 aa, Bacillus cereus G9241
MSTVNVQIGLHELLNGSNAQIQLSVPQLVEKVLMRNEGKLTSTGAVSASTGKYTGRSPKDKFIVKEASVADKIAWGAVNQPISEEHFNKLYTKVLEYLKEKEELFVFKGFAGADRNYRLPIQVINEYAWHNLFVHQLFIRPTEEELTTHESEFTIVSAPNFKADPAVDGTNSEAFIMVSFEKRIVLIGGTEYAGEMKKSIFSIMNFLLPEQDILSMHCSANVGEEGDVALFFGLSGTGKTTLSADPNRKLIGDDEHGWSDNGVFNIEGGCYAKCVNLSHEKEPQIFDAITFGSVLENVIINDQTRIADYNDTTLTENTRAAYPMHAIDNIVLPSVAGHPNTIIFLTADASGVLPPISKLSKEQAMYHFLSGYTSKLAGTERGVTSPQATFSTCFGSPFLPLDASRYAEMLGEKIEKHDAKVFLVNTGWTGGEYGVGKRMNLGYTRAMIQSALSGELAKTETAKHDIFGLEVPLHVPGVPDEVLMPEQTWADKAAYKAKAIELANEFKANFKKFDSVSEDIINLGGPIA

SEQ ID NO: 1217 - DNA, 1587 bp, Bacillus anthracis str. A2012
  CDS (1)..(1587): transl_table=11
  misc_feature (1454)..(1454): s is g or c
  misc_feature (1455)..(1455): w is a or t
atgagtactgtgaatgtccaaattggtttacacgaattattgaacggaagcaatgcacagattcaactaagtgttccgcaattagtggaaaaagtattaatgcgaaatgaagggaaattaacttcgactggtgccgtttctgcttcaactggaaaatatacaggacgttctcctaaagataaatttattgtgaaagaagcatcggttgctgacaaaattgcttggggagctgtgaatcaaccgatttctgaagaacattttaataaattatatactaaagttttagaatacttaaaagaaaaagaagagttattcgtcttcaaaggatttgcaggcgcggaccgcaattaccgtctaccaatccaagttattaatgaatatgcatggcacaatttatttgtacatcaattattcattcgtccaactgaagaagaattaacgactcatgaatcagaattcacaattgtttctgcaccaaatttcaaagctgatccagctgttgacggtacaaactctgaagcattcattatggtttcattcgaaaaacgtatcgtactaattggtggtacagaatacgctggagaaatgaaaaaatcaatcttctctattatgaacttcttactacctgaacaagatattctttctatgcattgctctgcaaacgtaggtgaagaaggcgacgtagcactattcttcggtttatctggaacaggtaaaacaacattatctgctgatccaaaccgtaaattaatcggtgatgatgagcatggttggtctgataacggtgtattcaatattgaaggcggttgctacgcaaaatgtgtaaacctttctcacgagaaagaaccacaaattttcgatgcaatcacatttggatctgttttagaaaacgttatcattaatgaccaaacgcgtatcgcagactataacgatactactttaacagaaaatactcgtgctgcataccctatgcatgcgatcgacaatatcatactgccaagtgttgctggacacccaaatacaattattttcttaactgctgatgcatctggcgtattgcctccaatcagcaagttatcaaaagaacaagctatgtaccatttcttaagtggttacactagtaaactagcaggaacagagcgcggcgttacatcaccgcaagcaacattctcaacttgcttcggttcaccattcttaccacttgatgcatctcgctatgctgaaatgcttggtgagaaaatcgagaaacacgatgcaaaagtattcttagtaaacactggctggactggtggcgaatacggcgttggtaaacgtatgaacttaggttacactcgtgcaatgattcaagcagcattaaacggtgaacttgcgaaaactgaaacagctaaacatgacatcttcggtcttgaagttccacttcacgtaccaggtgtacctgacgaagtgttaatgcswgaacaaacttgggctgataaagctgcttacaaagcaaaagcaatcgaacttgcaaatgaattcaaagcgaacttcaaaaagttcgacagcgtatctgaagacattattaacttaggcggtccaatcgcttaa

SEQ ID NO: 1218 - protein, 528 aa, Bacillus anthracis str. A2012
  misc_feature (485)..(485): The Xaa at location 485 stands for Arg, or Pro.
MSTVNVQIGLHELLNGSNAQIQLSVPQLVEKVLMRNEGKLTSTGAVSASTGKYTGRSPKDKFIVKEASVADKIAWGAVNQPISEEHFNKLYTKVLEYLKEKEELFVFKGFAGADRNYRLPIQVINEYAWHNLFVHQLFIRPTEEELTTHESEFTIVSAPNFKADPAVDGTNSEAFIMVSFEKRIVLIGGTEYAGEMKKSIFSIMNFLLPEQDILSMHCSANVGEEGDVALFFGLSGTGKTTLSADPNRKLIGDDEHGWSDNGVFNIEGGCYAKCVNLSHEKEPQIFDAITFGSVLENVIINDQTRIADYNDTTLTENTRAAYPMHAIDNIILPSVAGHPNTIIFLTADASGVLPPISKLSKEQAMYHFLSGYTSKLAGTERGVTSPQATFSTCFGSPFLPLDASRYAEMLGEKIEKHDAKVFLVNTGWTGGEYGVGKRMNLGYTRAMIQAALNGELAKTETAKHDIFGLEVPLHVPGVPDEVLMXEQTWADKAAYKAKAIELANEFKANFKKFDSVSEDIINLGGPIA

SEQ ID NO: 1219 - DNA, 1569 bp, Exiguobacterium sibiricum 255-15
  CDS (1)..(1569): transl_table=11
atgccgatgacggtcctgaatatcgaagaactactcaagaaggagcatgtgttcaaacaactgtctgttgctgaactagtcgaacatgcaattcgcaacaaagaaggagttcttgcagaaaatggtgctttgtctgtagaaacggggaaatttacaggtcgttcaccgaaagacaagttcatcgtccgtgatgactcatgtgagatgcatatcgattggggtcatgtcaatcaaccgatggagtcggacaaattcgagcaactgttacaaaaagttcttcgttatatgaacgaagcagatcaactctactacacagaagctgctgctggtgccgatacgcatttcacccttccagtgcgcgtcgtaaccgaatatgcttggcataatttgtttgcgaaacagctgtttttacgtgaatatcctacggttgcggcctttgaaccgtttacggtcgtctacgcaccacattttaaagcggatccggcggttgacggcacaaactccgagacattcatcgcgatgtcattcgaacaccggattgtcttgattggcggaacggagtatgccggagaaatcaaaaaatcaattttctctgtcatgaactatcttttaccccaacaagaagtcttgtcgatgcactgttcagcaaacgtcggacacggcggcgatgtcgccttattcttcggactctcaggaactggtaagaccacgctgtctgctgatgacagtcgccaattaatcggtgacgatgaacacggttggtctcatgacggtgtcttcaacatcgaaggtggctgctatgcgaaaacagttaatctgtcacgcgaaaaagaaccacaaatctttgatgcgatccgcttcggaaccgttcttgaaaatgtcgtcctcgatgatgcgcggattccggattatgatgatacttcattgactgaaaatacacgtgccgcttacccgattacagcaatcgacaacatcgccattccgtcacgcgccggtcacccgaaaacgattgtctttctgacggcggatgcctatggtgtcttgcctccaatcagtaaactgacgaaagaacaagcgatgtatcacttcttatccggctacacatcaaaactggctggaacggagcgcggcgttacagaaccggaagccacattctcgacgtgcttcggttcaccattcctgccgttgattccggaaaaatatgcgacgatgctcggggaactgattgatcgtcacggtgtcacagtctatctcgtcaacacaggctggaccggcggcgcttacggtacaggaagccggatgaaactctcctatacacgaacgatggtcaatgcggccgtcaacggtctgcttgcagacatcccgacagaagaacatccgattttcggtctgcatatgccgatcgaagtacctggtgttccgactgacttgctcaatccggtcaaggtctgggcggatgcatctgtttacgaacaacaagcgaccgcactcgcacaaaaattcacacagaacttcgcacgtttcgaaagtgcgaccgatgcgatcaaagcagccggtccccgcgtgtaa

SEQ ID NO: 1220 - protein, 522 aa, Exiguobacterium sibiricum 255-15
MPMTVLNIEELLKKEHVFKQLSVAELVEHAIRNKEGVLAENGALSVETGKFTGRSPKDKFIVRDDSCEMHIDWGHVNQPMESDKFEQLLQKVLRYMNEADQLYYTEAAAGADTHFTLPVRVVTEYAWHNLFAKQLFLREYPTVAAFEPFTVVYAPHFKADPAVDGTNSETFIAMSFEHRIVLIGGTEYAGEIKKSIFSVMNYLLPQQEVLSMHCSANVGHGGDVALFFGLSGTGKTTLSADDSRQLIGDDEHGWSHDGVFNIEGGCYAKTVNLSREKEPQIFDAIRFGTVLENVVLDDARIPDYDDTSLTENTRAAYPITAIDNIAIPSRAGHPKTIVFLTADAYGVLPPISKLTKEQAMYHFLSGYTSKLAGTERGVTEPEATFSTCFGSPFLPLIPEKYATMLGELIDRHGVTVYLVNTGWTGGAYGTGSRMKLSYTRTMVNAAVNGLLADIPTEEHPIFGLHMPIEVPGVPTDLLNPVKVWADASVYEQQATALAQKFTQNFARFESATDAIKAAGPRV

SEQ ID NO: 1221 - DNA, 1611 bp, Croceibacter atlanticus HTCC2559
  CDS (1)..(1611): transl_table=11
atggttacaaataccaacactacgaaatcgatttcgctagaaccttacggaatcaaggacacaacgacccattatcaacttacgccatcacaattacatgagacagcaatagcaaacggccaaggccaagaagctagcagcggcgctcttgcaattaacactggcgagtttactggacgttctcctttagaccgttttatcgttaaagacgatgttactaaagatgagatttggtggggaaatataaatatcccttttgatgcagataagtttgatgcactttatgataaagtcacagattacttatctggaaaagaagtttttgtgcgagatagctacgcttgtgcagatgaaaaatataaattaaatattcgtgttgtaaacgaatatccttggagcaatatgtttgcctataatatgtttttaagaccttcagaagatgagcttaaaaactttaaagaagaatggcttattgtaaatgcaccaggttttatggcagatcctgaagtagatggaacacgacagcacaactttgcaattttaaattttggaaagaaaatagcgcttattggtggtactggatatacaggtgaaattaaaaaagggattttctctgcgcttaattttatattgccagtacaaaaggaaactttaccaatgcactgctctgctaatgtaggagaagatggagatacttcaatcttttttggtctttctggaacaggtaaaactacattgtctgcagatcctaatagaaaacttattggagatgatgagcacggctggacaaaagaagataccatctttaattttgaaggcggttgttatgcaaaggttataaacctctcaaaagaaaacgaaccagatatttataatgcaattaaaccaggagctattcttgaaaacgttgtgttagatgaaaatggagatgtagattttgctgatactagcattactcaaaatacaagagttagttacccaatttatcatatagataatattcaggagccttcaataggaaagaatcctaaaaacatatttttcttaaccgcagatgcttttggtgtactgcctcctattagtaagctatctccaggtcaagctgcttatcactttattagtggttatacggcaaaggttgctggtacagaagctggtgtagatgagccaatgccatcgttctctgcgtgttttggagcaccatttatgcctttacacccaacacgttatgcagaaatgctaagtcagaaaatgaaagattctggcgtaaatgtttggttggtaaacacaggttggactggcggtccttatggtgttggaaaacgtatggctttaaagtatactagagctatgatttctgctgctatggatggttctttagaggaagcaaataaagataattaccacacacactcagtatttggcgttaaacaaccaagaacttgtcctaacgtgccaacagatgttttaagtcctcgtaagacttggaataatgatcaaggatactacaaaaaggcttatactttagcagaaagctttagacagaacttcttaaaatttgaagagtacgctaatgaagaaatattagcaggcgctccaaacgttaagtaa

SEQ ID NO: 1222 - protein, 536 aa, Croceibacter atlanticus HTCC2559
MVTNTNTTKSISLEPYGIKDTTTHYQLTPSQLHETAIANGQGQEASSGALAINTGEFTGRSPLDRFIVKDDVTKDEIWWGNINIPFDADKFDALYDKVTDYLSGKEVFVRDSYACADEKYKLNIRVVNEYPWSNMFAYNMFLRPSEDELKNFKEEWLIVNAPGFMADPEVDGTRQHNFAILNFGKKIALIGGTGYTGEIKKGIFSALNFILPVQKETLPMHCSANVGEDGDTSIFFGLSGTGKTTLSADPNRKLIGDDEHGWTKEDTIFNFEGGCYAKVINLSKENEPDIYNAIKPGAILENVVLDENGDVDFADTSITQNTRVSYPIYHIDNIQEPSIGKNPKNIFFLTADAFGVLPPISKLSPGQAAYHFISGYTAKVAGTEAGVDEPMPSFSACFGAPFMPLHPTRYAEMLSQKMKDSGVNVWLVNTGWTGGPYGVGKRMALKYTRAMISAAMDGSLEEANKDNYHTHSVFGVKQPRTCPNVPTDVLSPRKTWNNDQGYYKKAYTLAESFRQNFLKFEEYANEEILAGAPNVK

SEQ ID NO: 1223 - DNA, 1599 bp, Roseovarius nubinhibens ISM
  CDS (1)..(1599): transl_table=11
atgacattcggacgggtgaacccgaaattcagcctcgaagatcaagggatcaccgggctgggagaagttttttacaacctgatcgaaccggcgctggtcgaggccgcggtgaagaacggcgaaggcacgctgggccgtggcggggcgtttctcgtcaccaccggcaagttcaccggccgctcgcccaaggacaaacatgtcgtcaagaccgacagcgtcgccgacacgatctggtgggacaacaatgccgaaatgacccccgaagggtttgacgcgctctacgaggacatgatcgcccatatgcaaggcggccgctactacgtgcaggatctcaccggcggcgccgacccggcgcattcgatcaaggtccgcatggtgaccgaactggcctggcacgggctcttcatccgccacctgctgcgccgccccgaacgcgaggcgctggatcatttcgtcgcggatttcaccgtgatcaactgcccgagcttcaaggccgacccgaaaaagcacgattgccgctcggacaccgtcatcgcgatgaatttcgaccgcaagatgatcctcatcggcggcaccgaatatgctggcgagaataagaaatcggtcttctcgctgctcaactacctgctgcccgaaaaaggcatcatgccgatgcattgctcggccaaccatgccaagggcaacccggtcgacaccgccgtgttctttggcctgtcgggcaccggcaagacgacgctctcggctgatcccggccgcattctcatcggcgacgacgaacatggctggtcggatcgtggcaccttcaactttgaaggcggctgctatgccaagacgatcaacctcaaccccgaggccgagcccgagatctacgccaccacgtcgaaattcgccacggtgatcgagaacatggtctttgacgaagagaccaaggaacttgatttcgacgatgacagcctgacggccaacatgcgctgcgcctacccgctcgactatatctcgaacgcgtcggagacggccatcggcggccaccccaagaacatcatcatgctgacctgtgatgcgtttggcgtgctgcctccgatcgcccggctgaccccggcacaggcgatgtatcacttcctgtcgggctttacctccaaggtcgccgggaccgagcgcggcatcaccgagcccgagcccaccttctcgacctgctttggcgcgcccttcatgccgcgccgtcccgaggtctatggcaacctcctgcgcgaaaagatcgccaaacatggcgcgacctgctggctggtgaacaccggctggaccggcggcgcctatggcaccggctcgcggatgccgatcaaggccacccgcgccctgctcaccgccgcgctcgacggctcgctctccaaggtcaagttccgcaaggacccgaatttcggctttgacgtgcccgtggatgcgcccggcgtgcccgaggttctgctcgacccgcgccgcacctggggcaaccccgaggcctatgatgcgcaggccgcgaaactggtcgaaatgttcgcccagaatttcgagcaatacctgccgcatatcgacgaagatgtgaaagccgccgcactgggctaa

SEQ ID NO: 1224 - protein, 532 aa, Roseovarius nubinhibens ISM
MTFGRVNPKFSLEDQGITGLGEVFYNLIEPALVEAAVKNGEGTLGRGGAFLVTTGKFTGRSPKDKHVVKTDSVADTIWWDNNAEMTPEGFDALYEDMIAHMQGGRYYVQDLTGGADPAHSIKVRMVTELAWHGLFIRHLLRRPEREALDHFVADFTVINCPSFKADPKKHDCRSDTVIAMNFDRKMILIGGTEYAGENKKSVFSLLNYLLPEKGIMPMHCSANHAKGNPVDTAVFFGLSGTGKTTLSADPGRILIGDDEHGWSDRGTFNFEGGCYAKTINLNPEAEPEIYATTSKFATVIENMVFDEETKELDFDDDSLTANMRCAYPLDYISNASETAIGGHPKNIIMLTCDAFGVLPPIARLTPAQAMYHFLSGFTSKVAGTERGITEPEPTFSTCFGAPFMPRRPEVYGNLLREKIAKHGATCWLVNTGWTGGAYGTGSRMPIKATRALLTAALDGSLSKVKFRKDPNFGFDVPVDAPGVPEVLLDPRRTWGNPEAYDAQAAKLVEMFAQNFEQYLPHIDEDVKAAALG

SEQ ID NO: 1225 - DNA, 1599 bp, Oceanicola batsensis HTCC2597
  CDS (1)..(1599): transl_table=11
atgacatttggacgggtgaacccgaaattccgccttgaagatcaggggatcgagggtctgggcaatgtctattacaacctgatggagcccgcgctgatcgaagcagcgctgaagaacggcgaaggccgtctcggcaacgggggcgcctttctggtcaccaccggcaagttcacgggccgctcgcccaaggacaaacatgtcgtgaatacaacgaatgtctccgacaagatctggtgggagaacaacgccgagatgtcgccggaaggtttcgataacctgcacgccgacatgctcgatcacatgaagggcaaggactactacgtccaggatctcgtgggcggcgccgatccggcctatgcgatcaacgtccgcatggtgaccgaactggcctggcacgggctcttcatccgccacatgctgcgccgtcccgaccgggccacgctcgacaatttcatggccgacttcacggtgatcaactgcccgaccttccgggcggatcccggccgtcacgcctgccggtcggaaaccgtgatcgcgatgaacttcgacaagaagctgatcctgatcggcggcaccgaatacgcgggcgaaaacaagaaatcggtcttcaccctgctcaactacatcctgccggaaaagggcgtgatgccgatgcactgctcggccaaccacgcgcaggacaacccggtcgacaccgccgtcttcttcggcctctccgggaccggcaagaccaccctttcggccgacccgaaccgcgtcctgatcggcgacgacgaacacggctggtccgaccgcggcaccttcaacttcgaaggcggctgctacgccaagacgatctcgctcagccccgaggccgagcccgagatctacgccaccaccagcaagttcggcaccgtcatcgagaacatggtcttcgacgaagagaccttcgagctcgacttcgaggacgacagcctgaccgccaacatgcgctgcgcctatccgctggagtatatctccaacgcctcggacaccgcgctcggcggccatcccaagaacatcatcatgctgacctgcgacgccttcggggtcctgccgccgatctcgcggctcaccccggcgcaggcgatgtatcacttcctgtcggggttcacctccaaggtcgccggcaccgagcgtggcgtgaccgaacccgagcccacgttctcgacctgcttcggcgcccccttcatgccgcgtcgccccgaggaatacggcaatctcctgcgcgagaagatcgccaagcacggcgcgacctgctggctggtgaacaccggctggaccggcggcgcctacggcaccggatcgcggatgccgatcaaggccacgcgcgccctgctgaccgccgcgctggacgggtcgctgaacgaggccgagttccgcaaggatccgaacttcggcttcgacgtgccgatctcggtccccggggtcgcccaggtcctgctggacccgcgccggacatgggacgatcaggaggcctatgaccggcaggcacagaaactggtcaacatgttctccgagaacttcgcccagtacctgcccttcatcgacgaggacgtgaaggccgccgcgatcggctga

SEQ ID NO: 1226 - protein, 532 aa, Oceanicola batsensis HTCC2597
MTFGRVNPKFRLEDQGIEGLGNVYYNLMEPALIEAALKNGEGRLGNGGAFLVTTGKFTGRSPKDKHVVNTTNVSDKIWWENNAEMSPEGFDNLHADMLDHMKGKDYYVQDLVGGADPAYAINVRMVTELAWHGLFIRHMLRRPDRATLDNFMADFTVINCPTFRADPGRHACRSETVIAMNFDKKLILIGGTEYAGENKKSVFTLLNYILPEKGVMPMHCSANHAQDNPVDTAVFFGLSGTGKTTLSADPNRVLIGDDEHGWSDRGTFNFEGGCYAKTISLSPEAEPEIYATTSKFGTVIENMVFDEETFELDFEDDSLTANMRCAYPLEYISNASDTALGGHPKNIIMLTCDAFGVLPPISRLTPAQAMYHFLSGFTSKVAGTERGVTEPEPTFSTCFGAPFMPRRPEEYGNLLREKIAKHGATCWLVNTGWTGGAYGTGSRMPIKATRALLTAALDGSLNEAEFRKDPNFGFDVPISVPGVAQVLLDPRRTWDDQEAYDRQAQKLVNMFSENFAQYLPFIDEDVKAAAIG

SEQ ID NO: 1227 - DNA, 1632 bp, Photobacterium sp. SKA34
  CDS (1)..(1632): transl_table=11
atgagcacaatgtgtgtcgataataaggttgcaacgagcatggatttgtcccaatacggaatactcaatgttacagatgttattcgtaatccttcttacgaaatactattcgcagaagagacgaaaacagatttgaaagggtttgaaaaaggcattgtcaccgagctcggtgcggttgctgttgatacagggatatttaccggccgttcaccacaagataaatttattgtaaaagacaacactacccaagataccttgtggtggtcagatcaaggcaaaaacgataataagccacttagccaacaagcatggcatgatcttaaatctctcgtaacaacgcaactctctaacaagcgtctttttgtggtagatggctattgtggcgcaaatcctgatacacgtatatgtattcgggtgatcactgaagtcgcttggcaagcacacttcgttaaaaacatgtttattcgtccaacagaagctgagttagaaacatttgaacccgacttcgtgatcatgaatggctcaaagtgtactaaccctaaatggcaagagcacggcatgaattcagagaacttcacggtatttaacctctctgacaaaatacaacttattggtggtacatggtatggcggcgagatgaaaaaagggatgttcgcgatgatgaactactttttacctctcaaaggtattgcctctatgcattgctcggccaatataggagaaaatggtgataccgctatcttttttggcttatctggcacaggtaaaacaactttatcgactgatcctaaacgggcattaattggtgatgatgaacatggctgggacgataacggtgtgtttaactttgaaggtggatgttatgcaaaaaccattaacctttcaaaagaagctgaacctgatatctaccaggctattcgtcgtgatgcgttactggaaaacgtaacagtacgtaatgatggttctatcgattttaatgataattcaaaaacagaaaacacccgcgtttcttacccaatttatcatatcgataatatcgtaaaacctatctcaaaaggtggtcatgccaataaggttattttcttatcggcagatgctttcggtgttttacctccggtatcaaagctaacacccgagcaaactaaatatcacttcttgtcaggttttactgcaaaactcgcgggaacggaacgtggtattacagagccgacccccaccttctctgcgtgttttgggaatgcctttttaacacttcacccaacaaaatatgctgaagtgttagtgaaacgcatggaagcagcgggagctgaagcctatttagtcaatacaggctggaatggcacaggtaaacgtatttcgatccaagatactcgtggcattattgatgcgattttagatggctcgattgatagcgcaccaacgaaacaaattcctattttcaatttaaccgtgccgacggcattacctggtgtcgccactgagatcctagatcctcgtgatacctataccgacccactgcaatgggaaagtaaggccaaagatcttgcaagtcgatttatcgcaaacttcgataaatataccgataccgcagaaggcgaatctttagtcaaagcaggcccgcagctcgattaa

SEQ ID NO: 1228 - protein, 543 aa, Photobacterium sp. SKA34
MSTMCVDNKVATSMDLSQYGILNVTDVIRNPSYEILFAEETKTDLKGFEKGIVTELGAVAVDTGIFTGRSPQDKFIVKDNTTQDTLWWSDQGKNDNKPLSQQAWHDLKSLVTTQLSNKRLFVVDGYCGANPDTRICIRVITEVAWQAHFVKNMFIRPTEAELETFEPDFVIMNGSKCTNPKWQEHGMNSENFTVFNLSDKIQLIGGTWYGGEMKKGMFAMMNYFLPLKGIASMHCSANIGENGDTAIFFGLSGTGKTTLSTDPKRALIGDDEHGWDDNGVFNFEGGCYAKTINLSKEAEPDIYQAIRRDALLENVTVRNDGSIDFNDNSKTENTRVSYPIYHIDNIVKPISKGGHANKVIFLSADAFGVLPPVSKLTPEQTKYHFLSGFTAKLAGTERGITEPTPTFSACFGNAFLTLHPTKYAEVLVKRMEAAGAEAYLVNTGWNGTGKRISIQDTRGIIDAILDGSIDSAPTKQIPIFNLTVPTALPGVATEILDPRDTYTDPLQWESKAKDLASRFIANFDKYTDTAEGESLVKAGPQLD

SEQ ID NO: 1229 - DNA, 1611 bp, Flavobacteria bacterium BBFL7
  CDS (1)..(1611): transl_table=11
atgggttcaaataccttagttacgaaatcgatttcgttagaaaaatggggaattacaaattccaaaatcaattatcaactacctcctgcagagcttcagaaaattagtgtcgctagctttggtgggaaggagaccgcaaatggtacactcgctgttaatacaggggaatttactggtaggtcacctatggataggttcatcgtaagagatgaggttactgaagataaagtctggtggggagatattaatattccttttgaatcagataagtttgatgcgctactgactaaagttacttcttacttagatggcaaagatatatttgtaagagatgcttatgcttgtgcacatcaagattaccgtcttaatattagagttattaatgagtatccatggtctaacatgtttgcttacaatatgtttttgagaccagataatgatgagttagaaaacttttctccagagtggacagtgattaatgcacctggatttatggctgtaccggatcaagatggtacaagacaacataattttgctattcttaatttttctaggaagattgctcttataggtggaactggttatactggtgagattaagaaaggaatctttagtgcacttaattttatcttacctgtttataaagatacattgcctatgcactgtagtgcaaatgtgggaaaagatggtaatacagctatcttttttggtttaagtggtactggtaaaacgactctttctacagacccagatcgtgcattaatcggtgatgatgagcatggatggacttcaaataatgatgtattcaattttgaaggtggttgttatgcaaaggtaatcaacctcgatgcagaaggtgagccagagatatataacgccataaagcctggtgctatacttgaaaatgttattttaaattcagataaaacagttgactttaaggatactagtatcactcaaaatacgagagttagttatccaatatttcatattgagaatataaaaaaaccgtctgtagggaataatccaaagaatatctttttcttaactgcagatgcgtttggtgtattgcctcctatatcaaagttaactccaggacaagcggcatatcactttatcagtggttatactgcaaaagttgctggaacagaagctggtataacagaaccagtgcctagtttttctgcatgttttggggctccatttatgcctcttcatcctacaaagtatgctgaaatgttaagcgcgaaaatgaaggaaacaggtgtgaatgtatggttagtaaatacaggatggaccggtggaccatacggtgtcggttcacgtatgaagttaaagtatacacgagcaatgattactgctgcaatggatggtagtctagaagctgcaaataaagataactaccacgtacattcagtatttggagtagcgcagccgcgtacatgtcctaacgtgcctacggatgttttaagccctagagcgacatggaaaaatgatgacgggtattatgcgacagcttcaaaactgactaatgcttttagagataatttcaaaaagtttgaagaatatgcttcttcagagattatggctggagcgcctttgaaatattaa

SEQ ID NO: 1230 - protein, 536 aa, Flavobacteria bacterium BBFL7
MGSNTLVTKSISLEKWGITNSKINYQLPPAELQKISVASFGGKETANGTLAVNTGEFTGRSPMDRFIVRDEVTEDKVWWGDINIPFESDKFDALLTKVTSYLDGKDIFVRDAYACAHQDYRLNIRVINEYPWSNMFAYNMFLRPDNDELENFSPEWTVINAPGFMAVPDQDGTRQHNFAILNFSRKIALIGGTGYTGEIKKGIFSALNFILPVYKDTLPMHCSANVGKDGNTAIFFGLSGTGKTTLSTDPDRALIGDDEHGWTSNNDVFNFEGGCYAKVINLDAEGEPEIYNAIKPGAILENVILNSDKTVDFKDTSITQNTRVSYPIFHIENIKKPSVGNNPKNIFFLTADAFGVLPPISKLTPGQAAYHFISGYTAKVAGTEAGITEPVPSFSACFGAPFMPLHPTKYAEMLSAKMKETGVNVWLVNTGWTGGPYGVGSRMKLKYTRAMITAAMDGSLEAANKDNYHVHSVFGVAQPRTCPNVPTDVLSPRATWKNDDGYYATASKLTNAFRDNFKKFEEYASSEIMAGAPLKY

SEQ ID NO: 1231 - DNA, 1629 bp, Vibrio sp. Ex25
  CDS (1)..(1629): transl_table=11
atgaccgttatggaacatactaaggctgcaacacttgatctaaccaagcacggactgcataacgttaaagaggttattcgtaaccctagctacgaaatgttgtttgaggaagaaacgcgtgaagacctaacaggttatgagcgtggcgtggttactgaactaggtgcggttgccgttgacactggcatctttactggtcgctcaccaaaagataaatacatcgtcaaagacgctacgacagaagagcatatgtggtggacgtctgatcaagtaaaaaatgacaacaaaccaatcactccagaagtgtgggacgagctgaaagaactggtcacaaaccagctttctaacaaacgcttgtttgttgttgacggttactgtggtgcaaacccagatacgcgtttgagcattcgtgttatcacggaggtcgcatggcaagcgcacttcgttaaaaacatgtttatccgcccaacggaagaagaattggcaacatttgaaccagacttcgtggtaatgaatggcgcaaaatgcactaacccaaaatgggaagagcaaggtctgaactcagaaaacttcaccgtatttaacctaaccgagcgcatgcaacttatcggtggtacttggtacggcggtgagatgaagaaaggcatgttcgcaatgatgaactacttccttcctctaaaagacatcgcatcaatgcactgtagcgctaacatgggcaaagacggcgacgtagcggtattctttggtctctctggtacgggtaaaaccacactatcgactgatcctaaacgtgcgttaattggtgatgatgagcacggttgggatgatgacggcgtcttcaacttcgaaggtggttgttacgcgaaaaccatcaagctatcgaaagaagcggagccagacatctacaacgcaattcgccgtgatgcactgctagaaaacgtaacggtacgtagcgatggttctatcgactttgatgatggttcgaaaacagaaaacactcgtgtttcttaccctatctaccatatcgacaacatcgttaagccagtatcaaaaggcggtcacgcgaataaagtgatcttcctatcggcggacgcatttggtgtgctacctccagtgtctaaattgacacctgagcaaactaagtaccacttcctatctggctttactgcaaaattggcaggaacagagcgtggtattactgagccaacgccaaccttctctgcatgttttggcgcagcgttcctaacgcttcacccaactaaatacgcagaagtactggttaaacgtatggaagcagcaggcgctgaggcttacctagtgaacacaggttggaacggcactggcaaacgtatctcgattcaagatacgcgcggaattattgatgcgattcttgatggttcgattgaagatgcaccaactaagcacattcctatcttcaatcttgaagtaccgacttcactaccaggtgtggatccaagcattctagaccctcgtgacacgtacgttgatccacttcagtgggaaagcaaagcgaaagacttggctgaacgctttatcaataactttgataaatacacggacaatgcggaaggtaaatctctggttgccgctggccctcagattgattaa

SEQ ID NO: 1232 - protein, 542 aa, Vibrio sp. Ex25
MTVMEHTKAATLDLTKHGLHNVKEVIRNPSYEMLFEEETREDLTGYERGVVTELGAVAVDTGIFTGRSPKDKYIVKDATTEEHMWWTSDQVKNDNKPITPEVWDELKELVTNQLSNKRLFVVDGYCGANPDTRLSIRVITEVAWQAHFVKNMFIRPTEEELATFEPDFVVMNGAKCTNPKWEEQGLNSENFTVFNLTERMQLIGGTWYGGEMKKGMFAMMNYFLPLKDIASMHCSANMGKDGDVAVFFGLSGTGKTTLSTDPKRALIGDDEHGWDDDGVFNFEGGCYAKTIKLSKEAEPDIYNAIRRDALLENVTVRSDGSIDFDDGSKTENTRVSYPIYHIDNIVKPVSKGGHANKVIFLSADAFGVLPPVSKLTPEQTKYHFLSGFTAKLAGTERGITEPTPTFSACFGAAFLTLHPTKYAEVLVKRMEAAGAEAYLVNTGWNGTGKRISIQDTRGIIDAILDGSIEDAPTKHIPIFNLEVPTSLPGVDPSILDPRDTYVDPLQWESKAKDLAERFINNFDKYTDNAEGKSLVAAGPQID

SEQ ID NO: 1233 - DNA, 1539 bp, Alteromonadales bacterium TW-7
  CDS (1)..(1539): transl_table=11
atgattacaagcgctacacgttttgtcgatttaaccgcagctgaacttgtcgagcatgcgatccgccgtggcgaaggaactttagccgcaaatggtgctttcgtagccattacaggaaaacgaacaggccgttcacctcgagatcgttttattgtacaagaagctacaacacaaaatgaaattcaatggggcaatgtaaaccgccctttcgatgctgacaaatttgatgctttatgggcacgcgtagaagcacatgtgcaaagtaatgaccacttcacctctcacctagaagttggcgctgacccagagcattatttacctgtagttgttacaacagaaactgcatggcatcacatttttgccaaaaacatgtttattgaacctaaaaactataacgcttcaaacttaccacaatggcaagtgatgaacgtaccttcgtttgtatgtgaaccagaacgtgatggcactaacagcgatggcaccgtaattattaactttgcacaacgtaaagtattactggcgggaatgcgctacgccggtgaaatgaagaaatcgatgttctcagttcaaaacttcttattaccagctaagggtgtattaccaatgcactgttcggctaacgtgggggaagctggcgacacagcattattcttcggtttatctggcactggtaaaacaacgttatcagctgacccaactcgcttcctaatcggcgatgacgaacatggctgggcacctggtagtgtatttaacatcgaaggcggctgttacgcaaaatgtatcgacctttcacaaaagaatgagcctgttatttgggatgcaatccgctttggcactatcttagaaaatgttgtgcttgatgatagaggtgtgccagattttaacgatacaagtctgacccaaaatagcagagctgcgtacccattagaacatgttgaaaagcgtaaagtagaaaaccgcgcaggtgagcctaaagctgttgtattcttaacatgtgatgtgagtggcgtattacctcctgtgtctgtactgagtgaagaagccgctgcgtaccacttcctaagcggatatactgctaaagtaggttcaaccgaaattggttcaacaagcgatatagaatctacattctcaacctgttttggcgcaccgttcttcccacgtcctgcaggtgtttatgctgagcttctaatgaaacgtgtacgtgagtttggcgctaaagtttacctagtgaatactggctggactggcggtccttacggtatcggcaagcgttttgatataccaactacacgtgctgtaattgacgctatagtgtcaggtaaattagccggtgttgaaactcaacatattgatgcattgaacttaaacgtaccagttgcagtacctggtgttgatagcaaccttcttaacccaattaacacgtgggaagataaggctaaatataatgaatatgcagctaaattggctgctgactttacagaaaactttgctaaatacgacgtatctgacgatattaaaaatgcaggccctaaagcttaa

SEQ ID NO: 1234 - protein, 512 aa, Alteromonadales bacterium TW-7
MITSATRFVDLTAAELVEHAIRRGEGTLAANGAFVAITGKRTGRSPRDRFIVQEATTQNEIQWGNVNRPFDADKFDALWARVEAHVQSNDHFTSHLEVGADPEHYLPVVVTTETAWHHIFAKNMFIEPKNYNASNLPQWQVMNVPSFVCEPERDGTNSDGTVIINFAQRKVLLAGMRYAGEMKKSMFSVQNFLLPAKGVLPMHCSANVGEAGDTALFFGLSGTGKTTLSADPTRFLIGDDEHGWAPGSVFNIEGGCYAKCIDLSQKNEPVIWDAIRFGTILENVVLDDRGVPDFNDTSLTQNSRAAYPLEHVEKRKVENRAGEPKAVVFLTCDVSGVLPPVSVLSEEAAAYHFLSGYTAKVGSTEIGSTSDIESTFSTCFGAPFFPRPAGVYAELLMKRVREFGAKVYLVNTGWTGGPYGIGKRFDIPTTRAVIDAIVSGKLAGVETQHIDALNLNVPVAVPGVDSNLLNPINTWEDKAKYNEYAAKLAADFTENFAKYDVSDDIKNAGPKA

SEQ ID NO: 1235 - DNA, 1542 bp, Pseudomonas putida GB-1
  CDS (1)..(1542): transl_table=11
atgacgcaagccaacaacaccgtgtacaccgacctgagcgtcgatgagctggtaaaagaagcgctgcaacgcggtgaaggtgtactagccgatactggcgcactggtcgtagagaccggtcaccgtactggccgttcgccggctgaccgtttcatcgtcgaagaaccttccacccaggacgccatttcctggggcccgatcaaccgcaagttcccggccgacaagttcgatgccctgtgggctcgcgtcgaggcgttcaacaacgcccaggatcacttcgtttcctatgttcacgtaggggcggctgccgagcactacctgccggtgaagatgaccacccagactgcctggcagaacctgttcggccgttgcctgttcatcaacccggagcagttcaacccggctggccgcgaccagtggcaggtcctgaacgtcgccaacttcgtctgcgagcctgagcgtgacggcaccaactccgacggttgcgtgatcatcaacttcgcccagaagaaggtgctgatcgctggcatgcgttacgccggtgaaatgaagaaagccatgttctcggtgcagaacttcctgctgccggctgccgacgtgctgccaatgcactgcgcggccaacatcggtgaagaaggtgatgtgaccctgttcttcggcctgtccggcaccggcaagaccaccctgtctgccgacgaaagccgttacctgatcggtgacgacgagcacggttggggcgaaggcgttgtcttcaacatggaaggtggctgctacgccaagtgcatcgacctgtccgagaagaacgagccggtgatctggaaagccatcaagcacggcgcggtgctggaaaacgtcgtgctcgacgccaacaagcacgccgactacaccgatgtcagcctgacccagaacagccgtgcggcctacccgctggagcacgttgccaagcgctccgaagcgaacctgggcggcgagcctaacgcagtcatcttcctgacctgcgacctgaccggtgtactgcctccggtttcgatcctgaacaacgagcaggcggcctaccacttcctgtccggctataccgcgttggtcggttccaccgaaatgggttcgggcggcggcatcaagtcgaccttctccacctgcttcggcgcaccgtttttcccgcgcccggctggcgagtacgccgagctgctgatcaagcgcatcaacggcttcaactccaaggtttacctggtcaacaccggctggaccggtggtggctacggcgttggcaagcgcttcagcatcccgaccacccgtgccgtgatcgctgcgatccagagcggcgcgctggtcggtgccgaaaccgagcacctggacatcattaacctggacgtgccgaaggctgttccgggcgttgaaaccgagctgctcaacccgcgcaccaactgggctgacaaagctgcctacgacgaggccgccaaaggtctggccaagctgttcatcgaaaacttcaagaagttcgaagtttccgacgccatcaaggccgctggtccacagctgtaa

SEQ ID NO: 1236 - protein, 513 aa, Pseudomonas putida GB-1
MTQANNTVYTDLSVDELVKEALQRGEGVLADTGALVVETGHRTGRSPADRFIVEEPSTQDAISWGPINRKFPADKFDALWARVEAFNNAQDHFVSYVHVGAAAEHYLPVKMTTQTAWQNLFGRCLFINPEQFNPAGRDQWQVLNVANFVCEPERDGTNSDGCVIINFAQKKVLIAGMRYAGEMKKAMFSVQNFLLPAADVLPMHCAANIGEEGDVTLFFGLSGTGKTTLSADESRYLIGDDEHGWGEGVVFNMEGGCYAKCIDLSEKNEPVIWKAIKHGAVLENVVLDANKHADYTDVSLTQNSRAAYPLEHVAKRSEANLGGEPNAVIFLTCDLTGVLPPVSILNNEQAAYHFLSGYTALVGSTEMGSGGGIKSTFSTCFGAPFFPRPAGEYAELLIKRINGFNSKVYLVNTGWTGGGYGVGKRFSIPTTRAVIAAIQSGALVGAETEHLDIINLDVPKAVPGVETELLNPRTNWADKAAYDEAAKGLAKLFIENFKKFEVSDAIKAAGPQL

SEQ ID NO: 1237 - DNA, 2048 bp, Actinobacillus succinogenes
  CDS (259)..(1875): transl_table=11
ttaatttctttaatcgggacgctatcgataaattgaaaatgcagcaatagaggaaacacggtttgtttgagtgaaaacagccgtgttttttcatttaccgccataaaaatttgaaacggatcacaaatcatgaaaaaaatacgttcaaattagaactaattatcgaaaatttgatctagttaacattttttaggtataaatagttttaaaatagatctagtttggatttttaattttaaattatcaatgaggtgaagtatgactgacttaaacaaactcgttaaagaacttaatgacttagggcttaccgatgttaaggaaattgtgtataacccgagttatgaacaacttttcgaggaagaaaccaaaccgggtttggagggtttcgataaagggacgttaaccacgcttggcgcggttgccgtcgatacggggatttttaccggtcgttcaccgaaagataaatatatcgtttgcgatgaaactacgaaagacaccgtttggtggaacagcgaagcggcgaaaaacgataacaaaccgatgacgcaagaaacttggaaaagtttgagagaattagtggcgaaacaactttccggtaaacgtttattcgtggtagaaggttactgcggcgccagtgaaaaacaccgtatcggtgtgcgtatggttactgaagtggcatggcaggcgcattttgtgaaaaacatgtttatccgaccgaccgatgaagagttgaaaaatttcaaagcggattttaccgtgttaaacggtgctaaatgtactaatccgaactggaaagaacaaggtttgaacagtgaaaactttgtcgctttcaatattaccgaaggtattcagcttatcggcggtacttggtacggcggtgaaatgaaaaaaggtatgttctcaatgatgaactacttcctgccgttaaaaggtgtggcttccatgcactgttccgccaacgtaggtaaagacggtgacgtggctattttcttcggtttatccggtacgggtaaaacaacgctttcgaccgatcctaaacgccaattaatcggtgatgacgaacacggttgggatgaatccggcgtatttaactttgaaggcggttgttacgcgaaaaccattaacttatctcaagaaaacgaaccggatatttacggcgcaatccgtcgtgacgcattattagaaaacgtcgtggttcgtgcagacggttccgttgactttgacgacggttcaaaaacagaaaatacccgtgtttcatatccgatttaccacatcgacaacatcgttcgtccggtatcgaaagccggtcatgcaaccaaagtgattttcttaaccgcggacgcattcggcgtattgccgccggtttcaaaactgactccggaacaaaccgaatactacttcttatccggctttactgcaaaattagcgggtacggaacgcggcgtaaccgaaccgactccgacattctcggcctgtttcggtgcggcattcttaagcctgcatccgattcaatatgcggacgtgttggtcgaacgcatgaaagcctccggtgcggaagcttatttggtgaacaccggttggaacggcacgggtaaacgtatttcaatcaaagatacccgcggtattatcgatgcgattttggacggttcaatcgaaaaagcggaaatgggcgaattgccaatctttaatttagcgattcctaaagcattaccgggtgttgatcctgctattttggatccgcgcgatacttacgcagacaaagcgcaatggcaagttaaagcggaagatttggcaaaccgtttcgtgaaaaactttgtgaaatatacggcgaatccggaagcggctaaattagttggcgccggtccaaaagcataaaactgtaaaagcatagtatgtgcatgattcggtaaactaccgaataaaatctgaaaaataaggctgagtatttccactcagccttttgttttggaaattagaagttgtttagaaagataaacggcgcggcttattcgtcgtattatttgggacataaaaaacccgttgataaa

SEQ ID NO: 1238 - protein, 538 aa, Actinobacillus succinogenes
MTDLNKLVKELNDLGLTDVKEIVYNPSYEQLFEEETKPGLEGFDKGTLTTLGAVAVDTGIFTGRSPKDKYIVCDETTKDTVWWNSEAAKNDNKPMTQETWKSLRELVAKQLSGKRLFVVEGYCGASEKHRIGVRMVTEVAWQAHFVKNMFIRPTDEELKNFKADFTVLNGAKCTNPNWKEQGLNSENFVAFNITEGIQLIGGTWYGGEMKKGMFSMMNYFLPLKGVASMHCSANVGKDGDVAIFFGLSGTGKTTLSTDPKRQLIGDDEHGWDESGVFNFEGGCYAKTINLSQENEPDIYGAIRRDALLENVVVRADGSVDFDDGSKTENTRVSYPIYHIDNIVRPVSKAGHATKVIFLTADAFGVLPPVSKLTPEQTEYYFLSGFTAKLAGTERGVTEPTPTFSACFGAAFLSLHPIQYADVLVERMKASGAEAYLVNTGWNGTGKRISIKDTRGIIDAILDGSIEKAEMGELPIFNLAIPKALPGVDPAILDPRDTYADKAQWQVKAEDLANRFVKNFVKYTANPEAAKLVGAGPKA

SEQ ID NO: 1239 - DNA, 2154 bp, Solanum lycopersicum
  CDS (93)..(2081)
attcggcacgagtcgtgccgcacccttttcgttaaaattttattcttcaaattcagctttttcagctattcttcacttgattttcagaaaagatggcgtcgaacggagtcggaaatggagaattcagttttgataacaagaggaggactgggctgccgaagatccagacacagaagacagaggatgaaaacgtggtttgccatgacgacagtgcaacgccggtgaaagctcagacgctggaggaattgcattctcttcagaagaagaaatcggcgccgactactccgatcaagtcccctcatgtattcggcgttgccgtttctgaagaggaacgacagaaacaacagctgcaatccattagtgcatcattggcgtcattgacacgagagacggggccaaaagtggtgaaaggagacccagcaaggcaagcggagacgccaaaggtgcaacaacctgttcatcaccaccacacccctgcccttaacatcagtgacagtggcctcaagttcacccacatcctttataatctctctcctgctgagttgtatgagcaagctatcaagtatgagaagggatcattcatcacgtcaagcggtgctttagccacactttccggagccaaaactggccattccccaagagacaaacgtgttgttagagacgaaaccactgaggacgacctttggtggggaaagggttcacccaatatcgaaatggacgaacagactttcttaatcaacagagaaagagctgttgattacctatgctctttggagaaggtgtttgtgaatgatcagttcctcaactgggatccaaacaatcgtatcaaagttagaattgtatctgccagagcctatcactccttgttcatgcacaacatgtgtatccgacccactccagaagagctagaggattttggtactccggacttcacaatttacaatgctggtcaattcccatgtaaccgttacacccactatatgacttcctccactagcatagacatcaatcttgctaggagggaaatggtcatccttggcacacagtatgctggggaaatgaagaaaggtcttttcggggtaatgcactatctaatgcctaagcgccaaattctctctctacactctggctgcaatatgggaaaagaaggggatgtagccctcttctttggattatcaggaactgggaagacaacactgtctactgatcacaaccggtacctgatcggagatgatgaacactgctggagtgatcatggtgtctcaaacattgaaggaggttgctatgccaaatgcatagaccttgcaagggagaaggagcctgatatctggaatgccatcaagtttggcactgtgctggaaaacgtggtttttgaagaacatacccgagaagtggattatacagacaaattcgtaacagagaacacccgggcagcatatccaattgaatacatcccaaatgctaaaataccatgtgttggtcctcatccaaagaatgtcattctccttgcatgtgatgcattcggcgtgcttccaccagtcagcaaattgaacttggcacagacaatgtaccacttcatcagtggctacacagctttggtggcaggaaccgaagatggtattaaggagcctacagcaacattttcagcatgttttggtgcagcatttatcatgcttcatccaaccaaatatgcagccatgctggctgagaagatgctgaaacatggagctacaggatggcttgtgaacactggctggtcaggtggaagttatggatcaggcagccgaatcaagttagcatacactaggaagaacatcgatgccatccactccggcgatcttctgaaagcagaatacaagaagaccgaggtatttgggctggagattccaactgcacttgagggagtaccttccgagattctggaccccgtgaacacttggcccgacaagaaggcacacaaggataccctgttgaagctgggaggcctatttaggaagaattttgaggtgttcacaaactacaagattggaagtgatagcaacctgactgaggagatcctggcagctggtccaaacttctaattgaagaaggatttgcctgagtgatggtttggcaaaatatgactttaaaatatcaaaaaaaaaaaaaaaaaaa

SEQ ID NO: 1240 - protein, 662 aa, Solanum lycopersicum
MASNGVGNGEFSFDNKRRTGLPKIQTQKTEDENVVCHDDSATPVKAQTLEELHSLQKKKSAPTTPIKSPHVFGVAVSEEERQKQQLQSISASLASLTRETGPKVVKGDPARQAETPKVQQPVHHHHTPALNISDSGLKFTHILYNLSPAELYEQAIKYEKGSFITSSGALATLSGAKTGHSPRDKRVVRDETTEDDLWWGKGSPNIEMDEQTFLINRERAVDYLCSLEKVFVNDQFLNWDPNNRIKVRIVSARAYHSLFMHNMCIRPTPEELEDFGTPDFTIYNAGQFPCNRYTHYMTSSTSIDINLARREMVILGTQYAGEMKKGLFGVMHYLMPKRQILSLHSGCNMGKEGDVALFFGLSGTGKTTLSTDHNRYLIGDDEHCWSDHGVSNIEGGCYAKCIDLAREKEPDIWNAIKFGTVLENVVFEEHTREVDYTDKFVTENTRAAYPIEYIPNAKIPCVGPHPKNVILLACDAFGVLPPVSKLNLAQTMYHFISGYTALVAGTEDGIKEPTATFSACFGAAFIMLHPTKYAAMLAEKMLKHGATGWLVNTGWSGGSYGSGSRIKLAYTRKNIDAIHSGDLLKAEYKKTEVFGLEIPTALEGVPSEILDPVNTWPDKKAHKDTLLKLGGLFRKNFEVFTNYKIGSDSNLTEEILAAGPNF

SEQ ID NO: 1241 - DNA, 2016 bp, Arabidopsis thaliana
  CDS (1)..(2016)
atgtcggccggtaacggaaatgctactaacggtgacggagggtttagtttccctaaaggaccggtgatgccgaagataacgaccggagcagcaaagagaggtagcggagtctgccacgacgatagtggtccgacggtgaatgccacaaccatcgatgagcttcattcgttacagaagaaacgttctgctcctaccacaccgatcaaccaaaacgccgccgctgcttttgccgccgtctccgaggaggagcgtcagaagattcagcttcaatctatcagtgcatcgttagcatcgttaacgagagagtcaggaccaaaggtggtgagaggagatccggcggagaagaagaccgatggttcaactactccggcgtacgctcacggccaacatcattctatcttttctccggctactggtgctgtcagtgatagctccttgaagtttactcacgtcctctacaatctttcgcctgcagagctttatgagcaagctattaagtatgagaaaggttcgtttatcacttctaatggagctttggcgacgctttctggtgctaagactggtcgtgctcccagagataagcgtgttgttagagatgctactactgaggatgagctttggtggggaaagggttcgccgaatatcgaaatggatgaacatactttcatggtgaacagagaaagagctgttgattacttgaattccttggaaaaggtctttgtcaatgaccaatacttaaactgggatccagagaacagaatcaaagtcaggattgtctcagctagagcttaccattcattgtttatgcacaacatgtgtatccgaccaactcaggaggagcttgagagctttggtactccggattttactatatacaatgctgggcagtttccatgtaatcgttacactcattacatgacttcgtccactagcgtagaccttaatctggctaggagggaaatggttatacttggtactcagtatgctggggaaatgaagaagggtcttttcagtgtgatgcattaccttatgcctaagcgtcgtattctctcccttcattctggatgcaatatgggaaaagatggagatgttgctctcttctttggactttcaggtaccgggaagacaacgctgtctactgatcacaacaggtatcttattggagatgatgagcattgttggactgagactggtgtttcgaacattgagggtgggtgctatgctaagtgtgttgatctttcgagggagaaggagcctgatatctggaacgctatcaagtttggaacagttttggaaaatgttgtgtttgatgagcacaccagagaagtggattactctgataaatctgttacagagaacacacgtgctgcctacccaattgagttcattccaaatgcgaaaataccttgtgttggtccacacccgacaaatgtgatacttctggcttgtgatgcctttggtgttctcccacctgtgagcaagctgaatctggcacaaaccatgtaccacttcatcagtggttacactgctctggttgctggcacagaggatggtatcaaggagccaacagcaacattctcagcttgctttggtgcagctttcataatgttgcatcccacaaagtatgcagctatgttagctgagaagatgaagtcacaaggtgctactggttggctcgtcaacactggttggtctggtggcagttatggtgttggaaacagaatcaagctggcatacactagaaagatcatcgatgcaatccattcgggcagtctcttgaaggcaaactacaagaaaaccgaaatctttggatttgaaatcccaactgagatcgaagggataccttcagagatcttggaccccgtcaactcctggtctgataagaaggcacacaaagatactctggtgaaactgggaggtctgttcaagaagaacttcgaggtttttgctaaccataagattggtgtggatggtaagcttacggaggagattctcgctgctggtcctatcttttag

SEQ ID NO: 1242 - protein, 671 aa, Arabidopsis thaliana
MSAGNGNATNGDGGFSFPKGPVMPKITTGAAKRGSGVCHDDSGPTVNATTIDELHSLQKKRSAPTTPINQNAAAAFAAVSEEERQKIQLQSISASLASLTRESGPKVVRGDPAEKKTDGSTTPAYAHGQHHSIFSPATGAVSDSSLKFTHVLYNLSPAELYEQAIKYEKGSFITSNGALATLSGAKTGRAPRDKRVVRDATTEDELWWGKGSPNIEMDEHTFMVNRERAVDYLNSLEKVFVNDQYLNWDPENRIKVRIVSARAYHSLFMHNMCIRPTQEELESFGTPDFTIYNAGQFPCNRYTHYMTSSTSVDLNLARREMVILGTQYAGEMKKGLFSVMHYLMPKRRILSLHSGCNMGKDGDVALFFGLSGTGKTTLSTDHNRYLIGDDEHCWTETGVSNIEGGCYAKCVDLSREKEPDIWNAIKFGTVLENVVFDEHTREVDYSDKSVTENTRAAYPIEFIPNAKIPCVGPHPTNVILLACDAFGVLPPVSKLNLAQTMYHFISGYTALVAGTEDGIKEPTATFSACFGAAFIMLHPTKYAAMLAEKMKSQGATGWLVNTGWSGGSYGVGNRIKLAYTRKIIDAIHSGSLLKANYKKTEIFGFEIPTEIEGIPSEILDPVNSWSDKKAHKDTLVKLGGLFKKNFEVFANHKIGVDGKLTEEILAAGPIF

SEQ ID NO: 1243 - DNA, 2338 bp, Zea mays
  CDS (58)..(2058)
gttcgaaagccgcgcacgcacgtcggtcgtcccgagcaggacctcgatcggccgaggatggcgacgccgaacgggcttgcgcggatcgagacgaccgggaagaagaagcaggacaacggcgtgtggtacgacgacagctcggcgccggtgcgcgcgcagaccatcgacgagctgcactcgctgcagcggaagcggtcggcgcccaccacgcccaatcggtcggcgcccaccacgcccatcaagggcggcgcccactcgcccttcgccgtcgcgatctccgaggaggagcgccacacgcagcagatgcagtccatcagtgcgtcgttggcgtctctgacgcgtgaaaccgggccgaaagtggtcaagggcgacccggccgcgaagggagaggccgccgcgcagggcgcgccatcgacgccgagggcgcaccagcagcaccgccaccccgccgcccccgccatcgccgtcagcgacagctccctcaagttcactcatgtgctcaacaacctctcgcctgctgagctgtacgagcaggccatcaagtacgagaaggggtcgttcatcacgtccaccggcgcgctggcgacgctgtctggtgccaagaccgggcggtctcccagggacaagcgcgtcgtcaaggacgaggtcaccgcgcaggacctgtggtggggcaagggctcgcccaacatcgagatggacgagaagacgttcctgatcaacagggagagggccgtcgactacctcaactccctgaaggtagttcgtcaacgacagctactcaactgggaccccgagaaccggatcaaggtccgcatcatctccgccagggcgtaccactccctcttcatgcacaacatgtgcatccgccccacggacgaggagctggaggactttggcacgccggacttcaccatctacaacgcagggcagttcccctgcaaccgctacacccactacatgacgtcgtccacgagcatagacctcaacctcgccaggagggagatggtgatcatgggcacgcagtacgccggcgagatgaagaaggggctcttcggcgtcatgcactacctcatgcccaagcgcggcatcctctcgctgcactccggctgcaatatgggcaaggacggcgacgtcgccctcttctttggcctctcaggtaccgggaaaacgacgctgtcgacggatcacaacgggcttctgatcggcgacgacgagcactgctggagcgacaatggcgtgtccaacatcgagggaggctgctacgccaagtgcatcgacctggcgcaggagaaagagcctgatatttggaacgccatcaagtttggaactgtgctggagaacgtggtctttgatgagcatactcgtgaagtcgactacgccgactactctgtcaccgagaacactcgggctgcctacccgatcgagtacatccccatcgccaagataccatgcgtcgggccgcaccccaagaacgtgatcctcctggcgtgcgacgccttcggcgtgctcccgccggtgagcaagctgatactggcgcagaccatgtaccacttcatcagcggctacaccgctctggtcgccggcacggaggacggcatcaaggagccgcaggccaccttctccgcctgcttcggcgcggccttcatcatgctccacccgaccaagtacgccgccatgctcgccgagaagatgcagaagtacggcgccaccgggtggctcgtcaacaccggctggtcgggtggcaggtacggcgtgggcaagaggatcaggcttccctacaccagaaagatcatcgacgccatccactccggcgagctcctcaccgccaactaccagaagaccgaggtgtttggcctggagatccccactgagatcaacggcgtgccgtcggaaatcctcgacccgatctacacctggacggacaaggccgcgtacaaggagaatctcctgaggctcggcgggctcttcaagaacaacttcgaggtgttcgccagctacaagatcggggacgacagcagcctgactgacgagatcctcgcagcaggccccaacttctgaactaaagcaatggatccggatgaataaaacgatggtgtgtgtgcgtgggtgcgtgtgaagatgattacgacgacgacgaaaaaaaaggtgttggatcgatgagccaacatagtaatagattagctgggtatattgtcatgggtgcgtctggtctctggtcttgttatctataaagctgtctcaagcagctatcatattctatttcaaattctattctgttaagcgtgtagttcaaaacaatgctttacacaaccatatgcacagtctatctaagggttgg

SEQ ID NO: 1244 - protein, 666 aa, Zea mays
MATPNGLARIETTGKKKQDNGVWYDDSSAPVRAQTIDELHSLQRKRSAPTTPNRSAPTTPIKGGAHSPFAVAISEEERHTQQMQSISASLASLTRETGPKVVKGDPAAKGEAAAQGAPSTPRAHQQHRHPAAPAIAVSDSSLKFTHVLNNLSPAELYEQAIKYEKGSFITSTGALATLSGAKTGRSPRDKRVVKDEVTAQDLWWGKGSPNIEMDEKTFLINRERAVDYLNSLKVVRQRQLLNWDPENRIKVRIISARAYHSLFMHNMCIRPTDEELEDFGTPDFTIYNAGQFPCNRYTHYMTSSTSIDLNLARREMVIMGTQYAGEMKKGLFGVMHYLMPKRGILSLHSGCNMGKDGDVALFFGLSGTGKTTLSTDHNGLLIGDDEHCWSDNGVSNIEGGCYAKCIDLAQEKEPDIWNAIKFGTVLENVVFDEHTREVDYADYSVTENTRAAYPIEYIPIAKIPCVGPHPKNVILLACDAFGVLPPVSKLILAQTMYHFISGYTALVAGTEDGIKEPQATFSACFGAAFIMLHPTKYAAMLAEKMQKYGATGWLVNTGWSGGRYGVGKRIRLPYTRKIIDAIHSGELLTANYQKTEVFGLEIPTEINGVPSEILDPIYTWTDKAAYKENLLRLGGLFKNNFEVFASYKIGDDSSLTDEILAAGPNF

SEQ ID NO: 1245 - DNA, 1578 bp, Moorella thermoacetica
  CDS (1)..(1578): transl_table=11
atgagtaatacttatggtttagagcgattgggcatcattaatcctggcactatttatcgtaacctgccgatggcccggctggttgaaatagccctggcccggggagaaggcctcctagcttccaatggggctttaagcgttaataccggcaagtacaccggccgttccccccacgacaggtatatcgtggacactcccgccgttcacgacagcatcagttggggtgccgtcaaccagcccgtgagcgaggcgacctttgaacgcctctacagtcgcctgaccgcctacctccagggaaaggatctcttcgtttttgacggctttgtcggggccgatcctgcctaccgcatgcctatcaggattgtcaatgagtatgcctggcagaacctgtttgtccaccagctttttatcaggccgacggcggaagaactggccgggcatgagccccggtttaccgttatctgcgctccgggcttcaaggccattccggaggaagacggtacccgttccgaagcctttattattttaaactttgaccggcggctggtgatcatcggcggtacctcctatgccggcgagatgaaaaaatccatttttaccgtcatgaattatttgttgccagagcaaggtgtttgccccatgcactgctcggctaacatgggcccggcaggcgatacggccctgttcttcggtctttccggtaccggcaagactaccctgtcggccgatccggaacgctaccttattggcgacgatgagcatggatggtcggacaagggcatttttaactttgaaggcggttgttatgctaagtgcatcaagctctccgccgagcatgaaccccagatctggaatgccatccgtttcggcagcgtcctggagaatgtgatggtagaccccgattgccgaatcattgactacgacagcgatgccctgacggaaaacacccgcgctgcctacccggtagattttatccctaacgccgtcatccccggggtgggtggccatccccagacggtggtttttctcaccgctgacgcctttggcgttatgccgccgatagccaaactcacccgggaacaggccatgtactatttcctgtccggttataccagcaagctagccggtaccgagcggggggttaccgagcccaaggcgactttctcgacttgtttcggggcacccttcctgcctcggtcgcccatggtttacgccaacctcctgggggaaaggatagccaggcataacgccagcgtttacctggtcaataccggctggacaggggggccctatggcactggccggcgtatgagcctgccctatactcgggccatggtcagggcggctttaaacggtgaactggataaggtggaatttacccccgaccctgttttcggcttcctggtacctaaagcctgccccggagtcccggctgaaattctcaatccacgcaacacctgggcagaaacggaaaaatatgatgccatggctcgcaagctagccagcctcttcagggagaactttgccaaatttaaggacgtaccggtcagcatccaggaggccggagtggttggttga

SEQ ID NO: 1246 - protein, 525 aa, Moorella thermoacetica
MSNTYGLERLGIINPGTIYRNLPMARLVEIALARGEGLLASNGALSVNTGKYTGRSPHDRYIVDTPAVHDSISWGAVNQPVSEATFERLYSRLTAYLQGKDLFVFDGFVGADPAYRMPIRIVNEYAWQNLFVHQLFIRPTAEELAGHEPRFTVICAPGFKAIPEEDGTRSEAFIILNFDRRLVIIGGTSYAGEMKKSIFTVMNYLLPEQGVCPMHCSANMGPAGDTALFFGLSGTGKTTLSADPERYLIGDDEHGWSDKGIFNFEGGCYAKCIKLSAEHEPQIWNAIRFGSVLENVMVDPDCRIIDYDSDALTENTRAAYPVDFIPNAVIPGVGGHPQTVVFLTADAFGVMPPIAKLTREQAMYYFLSGYTSKLAGTERGVTEPKATFSTCFGAPFLPRSPMVYANLLGERIARHNASVYLVNTGWTGGPYGTGRRMSLPYTRAMVRAALNGELDKVEFTPDPVFGFLVPKACPGVPAEILNPRNTWAETEKYDAMARKLASLFRENFAKFKDVPVSIQEAGVVG

SEQ ID NO: 1247 - DNA, 1611 bp, Agrobacterium tumefaciens
  CDS (1)..(1611): transl_table=11
atgaacgagcttggggttcataatcctgccaatggagttgcggaactcggactgggcgaggcctcccgcgtcttttataacctcaatgagagcgaattatacgaacacgcgatccgtaacggcgaagccgaactgaccatcgacggcgcgctgcgcgccgtcaccggccagcatacgggccgctcgccgaaggataaattcgtcgttcgtgatgcttccaccgaaaacaccatctggtgggacaacaacaagccgctgtcgccggaaaatttcgagctgctgcgtcaggacatgctggcccatgccgccggcaagacgctttacgtgcaggatctgatcggcggtgccgatgaggaaaatgcgctgccgacccgcgtcgtcaccgagcttgcctggcattcgctgttcatccgcaatctactgatccggccgaagcgggagacgctttcgggcttcagccagaagctcaccatcatcaacctgccaagcttcaaggctgatccggcccgtcatggcgttcgctcggaaacggtcattgcctgcgatctgacgaatggcctcgtgctcatcggcggcacgtcctatgccggtgaaaacaagaagtcggtcttcacggtgctgaactacctgctgccggccaagggcgtgatgccgatgcattgctcggccaatgtcggtcctgagggtgattccgccgtgttcttcggcctctccggcaccggcaagaccacgctctccgccgacccggcacgcacgctgatcggcgatgacgaacatggctggggcgaacacggcatcttcaacttcgagggcggctgttatgccaaggcgatcaagctttcgtccgaggccgagccggaaatctacgccgcgaccaatcgtttcggcacggttctcgaaaacgtcgtgctggatgaaagccgggttcctgatttcaacgacaactcgctgacggaaaacacccgcagcgcctatccgctgcacttcattccgaatgcatcggaaacgggcattgccggccatccgaagacgatcatcatgctgacggcggatgccttcggcgtgctgccgccgatcgcgcgtctgacgccggaacaggccatgtaccacttcctctccggttacaccgccaaggttgccggcacggaaaagggcgtgaccgagccggaagccacattctccacctgcttcggcgcacccttcatgccgcgtcatccggcggaatacggcaacctgctgcgtgagctgatcggcaagcacggcgtcgattgctggctggtcaataccggctggaccggcggcgcctatggcatcggcaagcgtatgcccatcaaggcgacgcgcgcgcttctgaccgccgcacttaccggcgacctgaagaatgcgcaattccgcaccgatgcgaatttcggtttcgccgtaccgctgtcgctcgacggcgtcgatggtgcgatccttgatccacgttccacctgggccgatggcgcagcttacgacgcgcaggcgaagaagctggtatcgatgttcgtttcgaacttcaccaagttcgaagatcacgtcgacagcaaggttcgcgacgcagccccgggccttctgctcgcggctgaatga

SEQ ID NO: 1248 - protein, 536 aa, Agrobacterium tumefaciens
MNELGVHNPANGVAELGLGEASRVFYNLNESELYEHAIRNGEAELTIDGALRAVTGQHTGRSPKDKFVVRDASTENTIWWDNNKPLSPENFELLRQDMLAHAAGKTLYVQDLIGGADEENALPTRVVTELAWHSLFIRNLLIRPKRETLSGFSQKLTIINLPSFKADPARHGVRSETVIACDLTNGLVLIGGTSYAGENKKSVFTVLNYLLPAKGVMPMHCSANVGPEGDSAVFFGLSGTGKTTLSADPARTLIGDDEHGWGEHGIFNFEGGCYAKAIKLSSEAEPEIYAATNRFGTVLENVVLDESRVPDFNDNSLTENTRSAYPLHFIPNASETGIAGHPKTIIMLTADAFGVLPPIARLTPEQAMYHFLSGYTAKVAGTEKGVTEPEATFSTCFGAPFMPRHPAEYGNLLRELIGKHGVDCWLVNTGWTGGAYGIGKRMPIKATRALLTAALTGDLKNAQFRTDANFGFAVPLSLDGVDGAILDPRSTWADGAAYDAQAKKLVSMFVSNFTKFEDHVDSKVRDAAPGLLLAAE

SEQ ID NO: 1249 - DNA, 2295 bp, Anaerobiospirillum succiniciproducens
  CDS (370)..(1968): transl_table=11
aaaaagggtagaatctttttttaaattatatttaaggcatttgtagcgaagattatgtcctctttgagggcggttagggcactaaactaccagctgtgacgcttgtacgacgagtgctgcaaatttgtgcagtgatagtgcagctttgcgcaactttaaaaggcagtattttgaacaccgcatgcgatgtatagcgcctcgaatagccatttgtgcaataaaagcaaatcttttcattgcaactcatatcaaattttttaagttaaagagaatatcgtcgatccatagttgagaaaaataagctagaatgatggccggtttagaaagaattgcgtcaggattaccctggcatcattcgtggagaaaaaaatgagcttatctgaaagtttagctaaatacggcattactggtgctaccaacatcgtccacaatccttctcacgaggagttgtttgctgctgagactcaggcttctttagaaggcttcgagaagggcactgtaaccgagatgggtgcagtaaacgttatgactggcgtttacaccggccgttcccctaaggacaagttcattgttaagaacgaggcctccaaggagatctggtggacttctgatgagttcaagaacgacaacaagccagttaccgaagaggcatgggctcagttaaaggctttagcaggcaaggagctctctaacaagcctttatacgttgttgatctcttctgtggtgctaacgagaacacccgtctgaagatccgtttcgttatggaagtagcttggcaggctcacttcgtaaccaacatgttcatccgtcctactgaggaagagttaaagggcttcgagccagacttcgtagttctgaacgcttcaaaggctaaggttgagaacttcaaggagttaggcctcaactctgagactgctgttgtattcaacctcgcagagaagatgcagatcatcctcaacacctggtacggtggtgagatgaagaagggcatgttctccatgatgaacttctacttaccattacagggcatcgctgcaatgcactgctctgctaacaccgacctcgagggcaagaacactgctatcttcttcggtctgtcaggcactggtaagaccaccttatctaccgatcctaagcgtttactcatcggtgacgacgagcacggttgggacgatgatggcgtattcaacttcgaaggcggctgctacgctaaggttattaacctctctaaggaaaacgagccagacatctggggcgctatcaagcgtaacgctttattagagaacgtaactgttgatgctaacggcaaggttgactttgcagacaagtctgtaactgagaacacccgtgtttcttacccaatcttccacattaaaaacatcgttaagccagtttctaaggctccagctgctaagcgcgtaatcttcttatctgctgatgctttcggtgtattacctccagtatctatcctttctaaggagcagactaagtactacttcctctctggcttcaccgctaagttagctggtaccgagcgtggcattaccgagcctaccccaaccttctcttcatgcttcggtgctgctttcttaaccttacctccaaccaagtacgctgaagttctggttaagagaatggaagcttccggcgctaaggcttacttagtaaacactggctggaacggcactggcaagcgtatctccattaaggatacccgtggcattatcgacgcaatcttagacggttctatcgatactgcaaacaccgcaaccatcccttacttcaacttcaccgttcctactgagttaaagggcgttgacaccaagattctggacccacgtaacacctacgctgacgcttcagagtgggaagtaaaggctaaggacttagctgagcgcttccagaagaacttcaagaagttcgagtctttaggtggtgacttagttaaggctggtccacagttataattcctgtctgaccctttaagggcagaatagatgaattactaacgggcccgaggtgctatatgcgcctcgggccttttgtatttgtatagacaaggaagtctataggaggacaatttggcaaagaagccttacattacccctcaggatatgagttaaaaaggaattagattatctttggcttgaaaaacgtccagatgtaactgctaaggtttcatgggcctgcaagcttaggagatcgctccgagaacgctgactatcagtacaacaagcgtttgcttgctcagattgaccgtcgcattcgctatctacgtaagattcttaatgatc

SEQ ID NO: 1250 - protein, 532 aa, Anaerobiospirillum succiniciproducens
MSLSESLAKYGITGATNIVHNPSHEELFAAETQASLEGFEKGTVTEMGAVNVMTGVYTGRSPKDKFIVKNEASKEIWWTSDEFKNDNKPVTEEAWAQLKALAGKELSNKPLYVVDLFCGANENTRLKIRFVMEVAWQAHFVTNMFIRPTEEELKGFEPDFVVLNASKAKVENFKELGLNSETAVVFNLAEKMQIILNTWYGGEMKKGMFSMMNFYLPLQGIAAMHCSANTDLEGKNTAIFFGLSGTGKTTLSTDPKRLLIGDDEHGWDDDGVFNFEGGCYAKVINLSKENEPDIWGAIKRNALLENVTVDANGKVDFADKSVTENTRVSYPIFHIKNIVKPVSKAPAAKRVIFLSADAFGVLPPVSILSKEQTKYYFLSGFTAKLAGTERGITEPTPTFSSCFGAAFLTLPPTKYAEVLVKRMEASGAKAYLVNTGWNGTGKRISIKDTRGIIDAILDGSIDTANTATIPYFNFTVPTELKGVDTKILDPRNTYADASEWEVKAKDLAERFQKNFKKFESLGGDLVKAGPQL

SEQ ID NO: 1251 - DNA, 1626 bp, Ashbya gossypii
  CDS (1)..(1626)
atgtcgccatcaaaggtataccaaacaccagaggagaagatccgcgctgagcttgggctcagctcgggcgttttgacgattcggcgcaatgcgccggccgcggtgttgtacgaagatgcgctagcggagcgcaagacagcaatctccagcactggcgcgttgattgcgtactctggggaaaagacgggtcggtcgcctaaggacaagcggatcgtggacgagcccacgtcgtctgacaatatttggtggggtccagtgaaccgcaaggcgtcggagaagacgtggttgatcaaccgcgagcgtgccgcagacttcttgcgtacccgcgagcacctatacatcgtggatgcgtacgcgggctgggacccccgctaccgcatcaagatccggattgtgtgctgccgcgcataccacgcgttgttcatgaccaacatgttgatcaggccgaccgaagaggagcttgcggagttcggcgagccagacttcaccgtgtggaacgcgggccagttcccagcgaacacgcacactgagggtatgtcctcgaagaccactgtcgaaatcaacttcagggcgatggagatggtcatccttggcacggagtacgctggtgagatgaagaagggtatcttcacggtgatgttctacttgatgcctatcaaccacaacgtcttgacattgcactcctccgccaaccagggccccaacaacgatgtgacgctcttcttcggcttgagcggcactggtaagacgaccttgtctgcggaccagcaccggaaattgatcggcgacgacgagcactgctggtctgactacggtgtgttcaacatagaaggtgggtgctacgccaagtgtatcggcctaagcggggagaaggagccggaaatcttcaatgcaatcaagtacggctctgttttggagaacgtggtctacgacccagtaacgcgtgtcgtggactatgaggactcttcgatcaccgagaacacacgttgcgcgtacccaattgagtacatcccaagcgcgcagattccatgcttgtccgagaaccatccttctaacatcgttctattgacctgcgatgcctcaggtgtgttgccacctgtgtcccgtttgacgccggagcaggtgatgtaccacttcatctcgggctacacctccaagatggccggtactgagcagggagtcactgagcctgaggctaccttctcttcctgcttcggccagccattcctagccctacatccaatgaaatacgctacgatgttggctgaaaagatgtcgcagcataacgctagcgcctggttgattaacacgggctggactggctcctcgtatacggccggcggtaagcgctgtccattgaagtacacccgtgctatcttggactcgatccatgacggaaccttggcccaggctgaatacgagaccctacccgtctttggtttgtccattccaaaagcggtcgagggcgtgccagctgagttgctaaaccctgccaagaactgggtcgagggcgaaggcaagtacgctagcgccgtgtcggctttggcctcgaagttcacagagaactttaagatctatcaggaccaggccacagaggaggttgtccgcgctggcccacaaatatga

SEQ ID NO: 1252 - protein, 541 aa, Ashbya gossypii
MSPSKVYQTPEEKIRAELGLSSGVLTIRRNAPAAVLYEDALAERKTAISSTGALIAYSGEKTGRSPKDKRIVDEPTSSDNIWWGPVNRKASEKTWLINRERAADFLRTREHLYIVDAYAGWDPRYRIKIRIVCCRAYHALFMTNMLIRPTEEELAEFGEPDFTVWNAGQFPANTHTEGMSSKTTVEINFRAMEMVILGTEYAGEMKKGIFTVMFYLMPINHNVLTLHSSANQGPNNDVTLFFGLSGTGKTTLSADQHRKLIGDDEHCWSDYGVFNIEGGCYAKCIGLSGEKEPEIFNAIKYGSVLENVVYDPVTRVVDYEDSSITENTRCAYPIEYIPSAQIPCLSENHPSNIVLLTCDASGVLPPVSRLTPEQVMYHFISGYTSKMAGTEQGVTEPEATFSSCFGQPFLALHPMKYATMLAEKMSQHNASAWLINTGWTGSSYTAGGKRCPLKYTRAILDSIHDGTLAQAEYETLPVFGLSIPKAVEGVPAELLNPAKNWVEGEGKYASAVSALASKFTENFKIYQDQATEEVVRAGPQI

SEQ ID NO: 1253 - DNA, 1587 bp, Bacillus anthracis
  CDS (1)..(1587): transl_table=11
atgagtactgtgaatgtccaaattggtttacacgaattattgaacggaagcaatgcacagattcaactaagtgttccgcaattagtggaaaaagtattaatgcgaaatgaagggaaattaacttcgactggtgccgtttctgcttcaactggaaaatatacaggacgttctcctaaagataaatttattgtgaaagaagcatcggttgctgacaaaattgcttggggagctgtgaatcaaccgatttctgaagaacattttaataaattatatactaaagttttagaatacttaaaagaaaaagaagagttattcgtcttcaaaggatttgcaggcgcggaccgcaattaccgtctaccaatccaagttattaatgaatatgcatggcacaatttatttgtacatcaattattcattcgtccaactgaagaagaattaacgactcatgaatcagaattcacaattgtttctgcaccaaatttcaaagctgatccagctgttgacggtacaaactctgaagcattcattatggtttcattcgaaaaacgtatcgtactaattggtggtacagaatacgctggagaaatgaaaaaatcaatcttctctattatgaacttcttactacctgaacaagatattctttctatgcattgctctgcaaacgtaggtgaagaaggcgacgtagcactattcttcggtttatctggaacaggtaaaacaacattatctgctgatccaaaccgtaaattaatcggtgatgatgagcatggttggtctgataacggtgtattcaatattgaaggcggttgctacgcaaaatgtgtaaacctttctcacgagaaagaaccacaaattttcgatgcaatcacatttggatctgttttagaaaacgttatcattaatgaccaaacgcgtatcgcagactataacgatactactttaacagaaaatactcgtgctgcataccctatgcatgcgatcgacaatatcatactgccaagtgttgctggacacccaaatacaattattttcttaactgctgatgcatctggcgtattgcctccaatcagcaagttatcaaaagaacaagctatgtaccatttcttaagtggttacactagtaaactagcaggaacagagcgcggcgttacatcaccgcaagcaacattctcaacttgcttcggttcaccattcttaccacttgatgcatctcgctatgctgaaatgcttggtgagaaaatcgagaaacacgatgcaaaagtattcttagtaaacactggctggactggtggcgaatacggcgttggtaaacgtatgaacttaggttacactcgtgcaatgattcaagcagcattaaacggtgaacttgcgaaaactgaaacagctaaacatgacatcttcggtcttgaagttccacttcacgtaccaggtgtacctgacgaagtgttaatgcctgaacaaacttgggctgataaagctgcttacaaagcaaaagcaatcgaacttgcaaatgaattcaaagcgaacttcaaaaagttcgacagcgtatctgaagacattattaacttaggcggtccaatcgcttaa

SEQ ID NO: 1254 - protein, 528 aa, Bacillus anthracis
MSTVNVQIGLHELLNGSNAQIQLSVPQLVEKVLMRNEGKLTSTGAVSASTGKYTGRSPKDKFIVKEASVADKIAWGAVNQPISEEHFNKLYTKVLEYLKEKEELFVFKGFAGADRNYRLPIQVINEYAWHNLFVHQLFIRPTEEELTTHESEFTIVSAPNFKADPAVDGTNSEAFIMVSFEKRIVLIGGTEYAGEMKKSIFSIMNFLLPEQDILSMHCSANVGEEGDVALFFGLSGTGKTTLSADPNRKLIGDDEHGWSDNGVFNIEGGCYAKCVNLSHEKEPQIFDAITFGSVLENVIINDQTRIADYNDTTLTENTRAAYPMHAIDNIILPSVAGHPNTIIFLTADASGVLPPISKLSKEQAMYHFLSGYTSKLAGTERGVTSPQATFSTCFGSPFLPLDASRYAEMLGEKIEKHDAKVFLVNTGWTGGEYGVGKRMNLGYTRAMIQAALNGELAKTETAKHDIFGLEVPLHVPGVPDEVLMPEQTWADKAAYKAKAIELANEFKANFKKFDSVSEDIINLGGPIA

SEQ ID NO: 1255 - DNA, 1587 bp, Bacillus cereus
  CDS (1)..(1587): transl_table=11
atgagtactgtgaatgtccaaattggtttacacgaattattgaacggaagcaatgcacagattcaactaagtgttccgcaattagtggaaaaagtattaatgcgagatgaagggaaattaacttcgactggtgccgtttctgcttcaactggaaaatatacaggacgttctcctaaagataaatttattgtgaaagaagcatcggttgctgacaaaattgcttggggagcagtgaaccaaccgatttctgaagaacattttaataaattatatacgaaagttttagaatacttaaaagagaaagaagagttattcgtcttcaaaggatttgcaggcgctgaccgcaattaccgcctaccaattcaagttattaatgaatatgcatggcacaatctatttgtacatcaattattcattcgtccaactgaagaagaattaacaactcatgaatcagagttcacaattgtttctgcaccgaatttcaaggctgatccagctgttgacggcacaaactctgaagcatttattatggtttcattcgaaaaacgtatcgtactaattggtggtacagaatacgctggagaaatgaaaaaatcaatcttctctattatgaacttcttattacctgaacaagatattctttctatgcattgctctgcaaacgtaggtgaagaaggcgatgtagcactattcttcggtttatctggaacaggtaaaacaacattatctgctgatccaaaccgtaaattaatcggtgatgatgagcacggttggtctgataacggtgtattcaatattgaaggcggttgctacgcgaaatgtgtaaacctttctcacgagaaagaaccacaaattttcgatgcaatcacatttggatctgttttagaaaacgttatcattaatgaccaaacgcgtatcgcagactataacgatactactttaacagaaaatactcgtgctgcataccctatgcatgcgatcgacaatatcgtactgccaagtgttgcaggacacccaaatacaattatcttcttaactgctgatgcatctggcgtattgcctccaatcagtaagttatcaaaagaacaagctatgtaccacttcttaagtggttacactagtaaactagcaggaacagagcgcggtgttacatctccgcaagcaacattctcaacttgcttcggttcaccattcttaccacttgatgcatctcgctatgctgaaatgcttggtgaaaaaatcgagaaacacgatgcgaaagtattcttagtaaacactggctggactggtggcgaatacggcgttggtaaacgtatgaacttaggttacactcgtgcaatgattcaagcagcattaaacggtgaacttgcgaaaactgaaacagctaaacatgacatcttcggtcttgaagttccacttcacgtaccaggtgtacctgacgaagtgttaatgcctgaacaaacttgggctgataaagctgcttacaaagcaaaagcaatcgaacttgcaaatgaattcaaagctaacttcaaaaagttcgacagcgtatctgaagacattattaacttaggcggcccaatcgcttaa

SEQ ID NO: 1256 - protein, 528 aa, Bacillus cereus
MSTVNVQIGLHELLNGSNAQIQLSVPQLVEKVLMRDEGKLTSTGAVSASTGKYTGRSPKDKFIVKEASVADKIAWGAVNQPISEEHFNKLYTKVLEYLKEKEELFVFKGFAGADRNYRLPIQVINEYAWHNLFVHQLFIRPTEEELTTHESEFTIVSAPNFKADPAVDGTNSEAFIMVSFEKRIVLIGGTEYAGEMKKSIFSIMNFLLPEQDILSMHCSANVGEEGDVALFFGLSGTGKTTLSADPNRKLIGDDEHGWSDNGVFNIEGGCYAKCVNLSHEKEPQIFDAITFGSVLENVIINDQTRIADYNDTTLTENTRAAYPMHAIDNIVLPSVAGHPNTIIFLTADASGVLPPISKLSKEQAMYHFLSGYTSKLAGTERGVTSPQATFSTCFGSPFLPLDASRYAEMLGEKIEKHDAKVFLVNTGWTGGEYGVGKRMNLGYTRAMIQAALNGELAKTETAKHDIFGLEVPLHVPGVPDEVLMPEQTWADKAAYKAKAIELANEFKANFKKFDSVSEDIINLGGPIA

SEQ ID NO: 1257 - DNA, 1587 bp, Bacillus cereus
  CDS (1)..(1587): transl_table=11
atgagtactgtgaatgtccaaattggtttacacgaattattgaacggaagcaatgcacagattcaactaagtgttccgcaattagtggaaaaagtattaatgcgaaatgaagggaaattaacttcgactggtgccgtttctgcttcaactggaaaatatacaggacgttctcctaaagataaatttattgtgaaagaagcatcggttgctgacaaaattgcttggggagctgtgaaccaaccgatttctgaagaacattttaataaattatatactaaagttttagaatacttaaaagaaaaagaagagttattcgtcttcaaaggatttgcaggcgcggaccgcaattaccgtctaccaatccaagttattaatgaatatgcatggcacaatttatttgtacatcaattattcattcgtccaactgaagaagaattaacgactcatgaatcagaattcacaattgtttctgcaccaaatttcaaagctgatccagctgttgacggtacaaactctgaagcattcattatggtttcattcgaaaaacgtatcgtactaattggtggtacagaatacgctggagaaatgaaaaaatcaatcttctctattatgaacttcttactacctgaacaagatattctttctatgcattgctctgcaaacgtaggtgaagaaggcgacgtagcactattcttcggtttatctggaacaggtaaaacaacattatctgctgatccaaaccgtaaattaatcggtgatgatgagcatggttggtctgataacggtgtattcaatattgaaggcggttgctacgcaaaatgtgtaaacctttctcacgagaaagaaccacaaattttcgatgcaatcacattcggatctgttttagaaaacgttatcattaatgaccaaacgcgtatcgcagactataacgatactactttaacagaaaatactcgtgctgcataccctatgcatgcgatcgataatatcgtattgccaagtgttgctggacatccaaatacaattattttcttaactgctgatgcatctggcgtattgcctccaatcagtaagttatcaaaagaacaagctatgtatcatttcttaagtggttacactagtaaactagcaggaacagagcgcggtgttacatctccgcaagcaacattctcaacttgcttcggttcaccattcttaccacttgatgcatctcgctatgctgaaatgcttggtgagaaaatcgagaaacacgatgcaaaagtattcttagtaaacactggctggactggtggcgaatacggcgttggtaaacgtatgaacttaggttacactcgtgcaatgattcaagcagcattaaacggtgaacttgcgaaaactgaaacagctaaacatgacatcttcggtcttgaagttccacttcacgtaccaggtgtacctgacgaagtgttaatgcctgaacaaacttgggctgataaagctgcttacaaagcaaaagcaattgaacttgcaaatgaattcaaagctaacttcaaaaagttcgacagcgtatctgaagacattattaacttaggcggtccaatcgcttaa

SEQ ID NO: 1258 - protein, 528 aa, Bacillus cereus
MSTVNVQIGLHELLNGSNAQIQLSVPQLVEKVLMRNEGKLTSTGAVSASTGKYTGRSPKDKFIVKEASVADKIAWGAVNQPISEEHFNKLYTKVLEYLKEKEELFVFKGFAGADRNYRLPIQVINEYAWHNLFVHQLFIRPTEEELTTHESEFTIVSAPNFKADPAVDGTNSEAFIMVSFEKRIVLIGGTEYAGEMKKSIFSIMNFLLPEQDILSMHCSANVGEEGDVALFFGLSGTGKTTLSADPNRKLIGDDEHGWSDNGVFNIEGGCYAKCVNLSHEKEPQIFDAITFGSVLENVIINDQTRIADYNDTTLTENTRAAYPMHAIDNIVLPSVAGHPNTIIFLTADASGVLPPISKLSKEQAMYHFLSGYTSKLAGTERGVTSPQATFSTCFGSPFLPLDASRYAEMLGEKIEKHDAKVFLVNTGWTGGEYGVGKRMNLGYTRAMIQAALNGELAKTETAKHDIFGLEVPLHVPGVPDEVLMPEQTWADKAAYKAKAIELANEFKANFKKFDSVSEDIINLGGPIA

SEQ ID NO: 1259 - DNA, 1584 bp, Bacillus halodurans
  CDS (1)..(1584): transl_table=11
atgaatacgatatcaactacaacacgtcttgaacaattgctgggcgaccagcacgtcttaaaaaatgcaccagcttctactttagtggagaaatcattgcttcgtggcgaaggaaggctgactgatactggtgcgttaacagtagctacaggggcttatacaggacgctcaccaaaagataaatttatcgtggatgagacttctgtccatgaaaaaatcgaatggggacaagtcaaccaagccattgaaaaggaaacgtttctacatttatacgaaaaagttcttacgtacttagctgataaagatgaattgtttgaatttcgcggttttgcaggggctgacaagacgtatcgtcttccccttcaagtcgtaaacgaatttgcatggcacaatttattcgctcaacagctgttcattcagccaacaactgaagagttaacgcaacatacacctgagtttacaatcgtctcagcgccaggttttaaagctgatccgtcggtagatggcacacgatcggaagcatttgtgatcatctcgtttgaagagcgtatcgtccttattggtggaacggaatacgcaggagaaatgaaaaagtcgattttttctgttatgaactacctccttccagagcaagatgtcttatcgatgcattgttcagccaatgttggggtagaaggtgatgtcgctctatttttcgggttgtcgggtacaggaaaaacaaccctatcagctgatccaaaccgcaaactcatcggtgatgatgagcatggctggtcggagcgtggcgtttttaacattgaaggcggctgctacgccaaatgtgttaacctatcctacgaaaaagaaccgcaaatttggaatgcgatccgctttggctccgttcttgaaaatgtcatcgttgacgaaaaaacagggctaccggattacaacgatacatcgttaaccgaaaatacacgggcagcttattctcttgaagcgattccaaacagtgtgatcccaagcgtcgcaggtcatccgaacacgattatttttttgacggctgatgcctttggcgtgctgcctccaataagcaaacttactcctgaacaagcgatgtaccatttcttatcaggatacacgagcaagcttgctggaacggaacgaggggtcacgtcacctgaagcgacattctccacttgctttggcgcaccgtttttaccattaccagcagctcgatatgcggagatgctaggggagaaaatagcccaatacgaagttcaagtgttcctcgtcaataccggttggtcaggaggaccttacggtgtcggtcaacgcatgaagctcagctacacacgggcgatggttcaagcagctcttcaaggggaattaaatacggttgaaacgatcaccgattcggtatttggcctgcatatcccaacgcgttgtcccggggtaccagactttgtcctccagcctcgaaacacatgggacgacaaagaaaagtatgacaaaaaagcacaggagctcgcaaagcaatttatcgaaaattttaaacggttcacgaacgtaagtgaagcgattcaaaaagcaggaccaagtatttag

SEQ ID NO: 1260 - protein, 527 aa, Bacillus halodurans
MNTISTTTRLEQLLGDQHVLKNAPASTLVEKSLLRGEGRLTDTGALTVATGAYTGRSPKDKFIVDETSVHEKIEWGQVNQAIEKETFLHLYEKVLTYLADKDELFEFRGFAGADKTYRLPLQVVNEFAWHNLFAQQLFIQPTTEELTQHTPEFTIVSAPGFKADPSVDGTRSEAFVIISFEERIVLIGGTEYAGEMKKSIFSVMNYLLPEQDVLSMHCSANVGVEGDVALFFGLSGTGKTTLSADPNRKLIGDDEHGWSERGVFNIEGGCYAKCVNLSYEKEPQIWNAIRFGSVLENVIVDEKTGLPDYNDTSLTENTRAAYSLEAIPNSVIPSVAGHPNTIIFLTADAFGVLPPISKLTPEQAMYHFLSGYTSKLAGTERGVTSPEATFSTCFGAPFLPLPAARYAEMLGEKIAQYEVQVFLVNTGWSGGPYGVGQRMKLSYTRAMVQAALQGELNTVETITDSVFGLHIPTRCPGVPDFVLQPRNTWDDKEKYDKKAQELAKQFIENFKRFTNVSEAIQKAGPSI

SEQ ID NO: 1261 - DNA, 1584 bp, Bacillus licheniformis
  CDS (1)..(1584): transl_table=11
atgaattctgtagatttaacaactgacttacaaacgctattaacgggcgaaaacgttcagatgaacttatccgttccccatttggttgaaaagatccttgagcgcaaagaaggagtcttgacatcttccggagccgtgcgggcaacaaccggtacatacaccggccgctcgccaaaagacaaattcattgtggaagaagcgagcacaaaggacaaaatcgattggggcgcagtaaaccagccgatttcagaagccgcctttgaccggctgtacgcaaaagtgctcggctatttaaaggaacgcgatgaattgtatgtatttgaagggtttgcaggagcagacgaaaaataccggcttccgattactgttgtcaacgagttcgcctggcacaacctgtttgcaagacagttgttcatcagacctgaagaacatgataaaaaacctgaagaacagccgtttacgattctttcagctccgcatttcaaagccgatccgctcgttgacggaaccagatctgaaacgtttatcatcgtgtcgtttgagaagcggacgatcttaatcggaggcaccgaatatgccggagagatgaaaaaatcgattttttctattatgaattttcttctgcctgaacaaaacattctaccgatgcactgttcggcaaacattggcgaggaaggcggaactgctctcttcttcggattgtcaggtacaggcaaaacgacgctttccgccgatccgaagcggaagctgatcggcgacgacgaacacggctggtccagcacaggcgttttcaacattgaaggaggctgctacgccaaatgcattaacttaagcgaagaaaaagaaccgcagatttacaatgcgatccgcttcggttccgttctcgaaaatgtcgtggttgacagcaaaaccggagagccggactattccgactcattctacacggaaaacactagagcggcttacccgattgacgcgattgacaacatcgtcaagccgagcatcgcagcgcacccgcagaccatcgtatttttgaccgcagatgctttcggcgtgcttcctccgatcagcaagttaacgaaagaacaagccatgtatcatttcctgagcggatatacaagcaagctcgccggcaccgaacgcgggatcaccactcctgaagccacattctcgacctgcttcggttcaccgttcctcccgcttccggcacatgtgtacgctgaaatgctcggaagaaaaatcgatgagcacggggtcggcgtctttctcgtcaatacaggctggaccggcggcggatacggaaccggggaaagaatgagcctcgcatatacgagagcgatggttcaggccgcaatagaaggagaactggataaagccgaaatgaggactgaccgcattttcggacttcattcacctgtccacgttccgggtgtgcctgatcaagtgcttgacccggccaaaacttggacagatgaaaacgaatacgaggaaaaagcgatccacctggcgaaagcattcaaacagaatttcaaaaagttctccaatacggaaaacatcgaaaaagccggaggaccgctcgtttaa

SEQ ID NO: 1262 - protein, 527 aa, Bacillus licheniformis
MNSVDLTTDLQTLLTGENVQMNLSVPHLVEKILERKEGVLTSSGAVRATTGTYTGRSPKDKFIVEEASTKDKIDWGAVNQPISEAAFDRLYAKVLGYLKERDELYVFEGFAGADEKYRLPITVVNEFAWHNLFARQLFIRPEEHDKKPEEQPFTILSAPHFKADPLVDGTRSETFIIVSFEKRTILIGGTEYAGEMKKSIFSIMNFLLPEQNILPMHCSANIGEEGGTALFFGLSGTGKTTLSADPKRKLIGDDEHGWSSTGVFNIEGGCYAKCINLSEEKEPQIYNAIRFGSVLENVVVDSKTGEPDYSDSFYTENTRAAYPIDAIDNIVKPSIAAHPQTIVFLTADAFGVLPPISKLTKEQAMYHFLSGYTSKLAGTERGITTPEATFSTCFGSPFLPLPAHVYAEMLGRKIDEHGVGVFLVNTGWTGGGYGTGERMSLAYTRAMVQAAIEGELDKAEMRTDRIFGLHSPVHVPGVPDQVLDPAKTWTDENEYEEKAIHLAKAFKQNFKKFSNTENIEKAGGPLV

SEQ ID NO: 1263 - DNA, 1584 bp, Bacillus clausii
  CDS (1)..(1584): transl_table=11
atgaaaatgcttcaccgttcagctttactagaacaattgctttcaagccctaaaacgttgcaccaattgcccgcttcgacactcgtcgagcatgcactccaacgaaatgaaggcatattgaccgattctggcgcacttgctgtcaaaacaggcctttacacaggccgctcgcctcaagacaagtttattgtcgatgaaccaatgtctagagattccatccattggggcgcaacgaataagcccatttcatcggaagtgttcacccggctaaaagacaaagtgctacattatttgcaacaaaaagaggtccgttacgcatccgttggcttcgctggcgctgatccttctttccaactgccgattacgtatttaaatgagtttgcttggcatcacttgtttgctagacagctatttattcgtgagcaagctccttcaaacaatggtttggaaccatttacgatcattagcgcaccgacgtttaaagccgatccatccgtcgacggcactcgctcagaagcgtttgtcatcatctcatttgagcaacgcattattttaattggcggtacggaatatgccggtgaaatgaaaaaagcgatcttttccgtgatgaattacttgctccctgaagcaggcgtgctgccaatgcactgctcagccaacacaaccgatgaaggagaaacggcactcttttttggcctctcaggtaccggcaaaacgacactgtcggcttccgaacataggcgcctaatcggcgatgacgagcacggctggtcagaaaaaggcatctttaacattgaaggaggctgctacgccaaatgcatcggcctttcaaaagaaagcgaaccacaaatttgggacgctattgctttcggggcagtccttgaaaatgtcgtcgtcgatccaaacacgggcaaacctgactttaaaagcggtgagttgacggaaaatacgcgggctgcctacccgcttgaagcgattccaaatgctttgctgcctagtgttgccgggcctccaaaagcgataatattcttgactgctgatgcatttggcgtattgccgcccattagcaagttgacaaaagaacaagcaatgtaccattttctatctggttacacaagcaaactagcaggaacggaacgaggcatcacgcaacctgaggcgacattttctacttgctttggcgctccgtttttgccacgcaaaccagaagagtacgctactatgcttggggacaaattggaaaatgacgacgtccaagtgtttcttgtaaacacaggctggacagggggtagctatggaactggcacacgcattaagcttgcttatacacgtgccatggtagaagcggctttacaaggaaaattggatgagattgaaacagtgtgcgatcccatttttggcctttatgtcccaacacactgcccaggagtccctgatgagctgttgacccctcgacgtgtttggaaggacgaagcagcttacgaggcaaccgccttacagcttgctaagcaattccacgaaaatttttctgcctttccggcagcaaaagacagcgtccgtcttgctggaccacgccttgcataa

SEQ ID NO: 1264 - protein, 527 aa, Bacillus clausii
MKMLHRSALLEQLLSSPKTLHQLPASTLVEHALQRNEGILTDSGALAVKTGLYTGRSPQDKFIVDEPMSRDSIHWGATNKPISSEVFTRLKDKVLHYLQQKEVRYASVGFAGADPSFQLPITYLNEFAWHHLFARQLFIREQAPSNNGLEPFTIISAPTFKADPSVDGTRSEAFVIISFEQRIILIGGTEYAGEMKKAIFSVMNYLLPEAGVLPMHCSANTTDEGETALFFGLSGTGKTTLSASEHRRLIGDDEHGWSEKGIFNIEGGCYAKCIGLSKESEPQIWDAIAFGAVLENVVVDPNTGKPDFKSGELTENTRAAYPLEAIPNALLPSVAGPPKAIIFLTADAFGVLPPISKLTKEQAMYHFLSGYTSKLAGTERGITQPEATFSTCFGAPFLPRKPEEYATMLGDKLENDDVQVFLVNTGWTGGSYGTGTRIKLAYTRAMVEAALQGKLDEIETVCDPIFGLYVPTHCPGVPDELLTPRRVWKDEAAYEATALQLAKQFHENFSAFPAAKDSVRLAGPRLA

SEQ ID NO: 1265 - DNA, 1611 bp, Brucella suis
  CDS (1)..(1611): transl_table=11
atgaaagagaccggcatccacaataaggccgcttcgatttccacttcgggactgaaggaactctccgcagtcttctacaatctcgggccggcacggctttatgaagagaccattcgccggggcgaagcggagctttccgcgcagggcgcgctcgttgcccgtaccggccagcacacgggccgttcgccgaaagacaagttcgtcgtgcgcgacgccaataccgaagatcatgtgtggtgggacaacaacaagcccatgacgccggaagcttttgagcttctctatgccgatttcatcgaacatgcgaagggcagggagcttttcgttcaggatctcatcggcggcgcggatgccgacaacaagatcaacgcccgcgtcatcaccgaatatgcttggcattcgctgttcatccgcaatctgctgatccgtccgtcgcaggaagcccttgcttcctacgtgccggaaatgaccatcatcgacctgccgtccttcaaggctgacccggaacgctatggcgtgcgcaccgaaacggtgatcgcggtcgatcttacccgcaagatcgtgctgatcggcggcacgtcctatgcgggcgagatgaagaagtccgtcttcaccgcgctcaactatatcctgcctgccaagggcgttatgccgatgcactgctcggccaatgaaggcccgaacggcgacacggcggttttcttcggtctttcgggcaccggcaagaccacgctttccgccgatccgacgcgcacgctgatcggtgacgacgaacatggctggggcgaacatggcgtcttcaattttgaaggcggctgctatgccaagaccatccgtctttccgccgaagcagaaccggaaatctatgccacgacgcaacgtttcggcacggttctggaaaatgtcgtgctggacgagaatcgccagccggatttcgacgatggttcgctgacggaaaacacgcgctgcgcctatccgctggatttcatccccaacgcctcgaaatcgggcaagggcggccagccgaagaatatcatcatgctcaccgccgatgccttcggcgtgatgccgcccatcgccaagctgacgccggcgcaggccatgtatcacttcctgtccggctataccgccaaggtggcaggcacggaaaagggcgtgacggaaccggaggcaaccttctccacctgcttcggtgcgcctttcatgccgcgccatccttcggaatatggcaacctgttgcgcaagctgattgccgagcacaaggttgattgctggctggtcaataccggctggacgggcggcgcttacggcgttggcaagcggatgccgatcaaggcaacccgcgcgcttctggcagcggccctcgacggctcgctgaacaatgctgaattccgcatcgatccgaatttcggcttcgccgtccctgtcgaagtgccgggtgtggaaagctccattctcgatccgcgctcgacctgggccgacaaagttgcctatgacgcccaggccaagaagctggtcgacatgttcgtttccaacttcgagaagtttgaaagccacgtcgaccacgaggtcaaggatgccgcaccggcgatccgcatggctgctgaatag

SEQ ID NO: 1266 - protein, 536 aa, Brucella suis
MKETGIHNKAASISTSGLKELSAVFYNLGPARLYEETIRRGEAELSAQGALVARTGQHTGRSPKDKFVVRDANTEDHVWWDNNKPMTPEAFELLYADFIEHAKGRELFVQDLIGGADADNKINARVITEYAWHSLFIRNLLIRPSQEALASYVPEMTIIDLPSFKADPERYGVRTETVIAVDLTRKIVLIGGTSYAGEMKKSVFTALNYILPAKGVMPMHCSANEGPNGDTAVFFGLSGTGKTTLSADPTRTLIGDDEHGWGEHGVFNFEGGCYAKTIRLSAEAEPEIYATTQRFGTVLENVVLDENRQPDFDDGSLTENTRCAYPLDFIPNASKSGKGGQPKNIIMLTADAFGVMPPIAKLTPAQAMYHFLSGYTAKVAGTEKGVTEPEATFSTCFGAPFMPRHPSEYGNLLRKLIAEHKVDCWLVNTGWTGGAYGVGKRMPIKATRALLAAALDGSLNNAEFRIDPNFGFAVPVEVPGVESSILDPRSTWADKVAYDAQAKKLVDMFVSNFEKFESHVDHEVKDAAPAIRMAAE

SEQ ID NO: 1267 - DNA, 1575 bp, Campylobacter jejuni
  CDS (1)..(1575): transl_table=11
atgaaaaaatttgataagttaggtttggataatataaaggaaatttttcataatttaagttatgatgaattaaatgctcatgaaaaagcaaataatgaaggtttaagcacggataatgatactttttgtgtagatacagggatttttacaggtagaagtcctaaagataaatattttgtaaaacaagatccatctagtaaatatatagcttggggaaaggtaaatcagcctattacaaaagaattatttgataaacttttaactaaagcaaagcaagaattaagcggaaagaaaatttatgttcaagatgttttttgcggtgcttctttgcaaagtcgcaaagcagtaagatttgttactgaaattgcatggcaagcgcattttgttaaaaatatgtttattcgcccaagtcaagaggaacttgagaattttaaagcagattttattgtttataatgcttgcaaatgcatcaatgaagattacaaacaagatggtttaaattcagaggtttttgtgatctttaatgttgaagaaaatatagcggttattggtggaacttggtatggtggagaaatgaaaaaaggtattttttctatgatgaattattggttaccactagaaaataaactttctatgcattgtagtgcaaatgtcggagaaaaagacgatgtggcacttttctttggacttagcggtacaggaaaaactacgctttcaaccgatccaaaaagaagactcataggtgatgatgagcatggctgggatgatgaaggtgtgtttaattttgagggcggttgctatgcaaaaacaatcaatcttgatcctgaacatgagcctgaaatttatggagctattaaaagaaatgcacttttagaaaatgtagttttaagagctgataagagtgttgattatgctgatgcctcaaaaacagaaaacacgagagtttcttatcctatagagcatattgaaaatcatgagcctagtctaaaagcagggcatccaaaaaatattatatttttaagtgcagatgcttttggaattttacccccggtaagcaaactaagcaaagagcaggctatgtattattttttaagtggctatacagcaaaagtagctggaactgagcgcggcataacagagcctcaagcaactttttcagcttgttttggagaaccttttatgcctttacatccaacggtttatgcgagattgcttggtgaaaagattgaaaaacatgaagttaatgtttatcttgttaatacgggttggagtggcggaagctacggtgtgggtaaaagaatgagcattaaggctactagggcttgcattaatgccattctagatggaagtattacaaaatgcgaatttgaaaattttgaagtgtttgatttagctattccaaaagctttagaaggtgtagaaagtgtacttttaaatcctataaatacttggttagataaaaatgcttatattgcaacaagagataaattagcacatatgtttatacaaaattttaaacgttatgaagatgtcaaagaaggcattgaatttagcaaatttggaccaaaaatttaa

SEQ ID NO: 1268 - protein, 524 aa, Campylobacter jejuni
MKKFDKLGLDNIKEIFHNLSYDELNAHEKANNEGLSTDNDTFCVDTGIFTGRSPKDKYFVKQDPSSKYIAWGKVNQPITKELFDKLLTKAKQELSGKKIYVQDVFCGASLQSRKAVRFVTEIAWQAHFVKNMFIRPSQEELENFKADFIVYNACKCINEDYKQDGLNSEVFVIFNVEENIAVIGGTWYGGEMKKGIFSMMNYWLPLENKLSMHCSANVGEKDDVALFFGLSGTGKTTLSTDPKRRLIGDDEHGWDDEGVFNFEGGCYAKTINLDPEHEPEIYGAIKRNALLENVVLRADKSVDYADASKTENTRVSYPIEHIENHEPSLKAGHPKNIIFLSADAFGILPPVSKLSKEQAMYYFLSGYTAKVAGTERGITEPQATFSACFGEPFMPLHPTVYARLLGEKIEKHEVNVYLVNTGWSGGSYGVGKRMSIKATRACINAILDGSITKCEFENFEVFDLAIPKALEGVESVLLNPINTWLDKNAYIATRDKLAHMFIQNFKRYEDVKEGIEFSKFGPKI

SEQ ID NO: 1269 - DNA, 1575 bp, Campylobacter jejuni
  CDS (1)..(1575): transl_table=11
atgaaaaaatttgataagttaggtttggataatataaaggaaatttttcataatttaagttatgatgaattaaatgctcatgaaaaagcaaataatgaaggtttaagcacggataatgatactttttgtgtagatacagggatttttacaggtagaagtcctaaagataaatattttgtaaaacaagatccatctagtaaatatatagcttggggaaaggtaaatcagcctattacaaaagaattatttgataaacttttaactaaagcaaagcaagaattaagcggaaagaaaatttatgttcaagatgttttttgcggtgcttctttgcaaagtcgcaaagcagtaagatttgttactgaaattgcatggcaagcacattttgttaaaaatatgtttattcgcccaagtcaagaggaacttgagaattttaaagcagattttattgtttataatgcttgcaaatgcatcaatgaagattacaaacaagatggtttaaattcagaggtttttgtgatctttaatgttgaagaaaatatagcggttattggtggaacttggtatggtggagaaatgaaaaaaggtattttttctatgatgaattattggttgccactagaaaataaactttctatgcattgtagtgcaaatgtcggagaaaaagacgatgtggcacttttctttggacttagcggtacaggaaaaactacgctttcaaccgatccaaaaagaagactcataggtgatgatgagcatggctgggatgatgaaggtgtgtttaattttgagggcggttgctatgcaaaaacaatcaatcttaatcctgaacatgagcctgaaatttatggagccattaaaagaaatgcacttttagaaaatgtagttttaagagctgataagagtgttgattatgctgatgcctcaaaaacagaaaacacgagagtttcttatcctatagagcatattgaaaatcatgagcctagtctaaaagcagggcatccaaaaaatattatatttttaagtgcagatgcttttggaattttacccccggtgagcaaactaagcaaagagcaggctatgtattattttttaagtggctatacagcaaaagtagctggaactgagcgcggtataacagagcctcaagcaactttttcagcttgttttggagaaccttttatgcctttacatccaacggtttatgcgagattgcttggtgaaaagattgaaaaacatgaagttaatgtttatcttgttaatacgggttggagtggcggaagctacagtgtgggtaaaagaatgagcattaaggctactagggcttgcattaatgctattctagatggaagtattacaaaatgcgaatttgaaaattttgaagtgtttgatttagctattccaaaagctttagaaggtgtagaaagtgtacttttaaatcctataaatacttggttagataaaaatgcttatattgcaacaagagataaattagcacatatgtttatacaaaattttaaacgttatgaagatgtcaaagaaggcattgaatttagcaaatttggaccaaaaatttaa

SEQ ID NO: 1270 - protein, 524 aa, Campylobacter jejuni
MKKFDKLGLDNIKEIFHNLSYDELNAHEKANNEGLSTDNDTFCVDTGIFTGRSPKDKYFVKQDPSSKYIAWGKVNQPITKELFDKLLTKAKQELSGKKIYVQDVFCGASLQSRKAVRFVTEIAWQAHFVKNMFIRPSQEELENFKADFIVYNACKCINEDYKQDGLNSEVFVIFNVEENIAVIGGTWYGGEMKKGIFSMMNYWLPLENKLSMHCSANVGEKDDVALFFGLSGTGKTTLSTDPKRRLIGDDEHGWDDEGVFNFEGGCYAKTINLNPEHEPEIYGAIKRNALLENVVLRADKSVDYADASKTENTRVSYPIEHIENHEPSLKAGHPKNIIFLSADAFGILPPVSKLSKEQAMYYFLSGYTAKVAGTERGITEPQATFSACFGEPFMPLHPTVYARLLGEKIEKHEVNVYLVNTGWSGGSYSVGKRMSIKATRACINAILDGSITKCEFENFEVFDLAIPKALEGVESVLLNPINTWLDKNAYIATRDKLAHMFIQNFKRYEDVKEGIEFSKFGPKI

SEQ ID NO: 1271 - DNA, 1611 bp, Colwellia psychrerythraea
  CDS (1)..(1611): transl_table=11
atgaccgccccgaaaaactcaattgatttgtcacaatacggcatcgacgatgttaacgaagttgtttataacccatcgtatgagttactttttagtgaagaaactaaagctggccttgagggctttgataaaggcatagtaactgagcttggtgcagttaatgtagacacggggatatttaccggtcgctctcctaaagataagtatattgttcgcgatgatgtaactcgcgatacagtatggtggtctgatcaaggtaaaaatgataataaggctatgactcctgaaacatgggatcacttaaaaggcttagtaactacacaactttctggccaacgtttatttgttgttgatactttttgtggtgctgatgaagcaacacgtttaaaagtacgtttcattacacaagtagcttggcaagcacatttcgttaaaaacatgttcattcgtcctaccgatgcagaacttgaaaattacgaacccgatttcgtggtaatgaatggtgcgaaaacagttaatgataaatgggaagagcaaggtttaaactcagagaactttgttgctttcaacttaactgaaaaaattcaattgattggcggtacttggtacggcggcgagatgaaaaaaggtatgttctcaatgatgaactactaccttccattacaaggcattgcttcaatgcattgtagtgcaaacgttggtgaagatggtgacactgctatcttcttcggtttgtctggcacaggtaaaacaacactttctaccgatcctaaacgtcaacttatcggtgatgatgaacacggttgggatgacaatggagtatttaactttgaaggtggctgttacgctaaaacaatcaacctaagcaaagaaaacgaacctgatatttacaatgccattcgtcgtgacgctttactagaaaacgttacggttgatgcaaatggtaaaatcgattttgatgataattcaaaaacagaaaacacacgtgtttcttacccaattcatcatattgataacattgttaagcctgtttcacgtgctggtcatgctaaaaaagttatcttcttaacggctgatgcttttggtgttttaccacccgtagctaaattaacaccagaacaaacagaatattactttctttcaggttttaccgctaaattagcaggtactgaacgtggtattactgaaccaacaccaactttctcaagttgttttggagcagcgttcttaagcttacaccctacgcaatatgctgaagttttacataagcgtatggatgatgctggcgctgaagcttaccttgtaaacactggctggaatggtactggcaaacgaatttctatcaaagcaacgcgtgctattattgatgcaatcttagatggttcaattgacaatgctgaaactgaaaccgtaccgtttttcaacttagaagtacctaaagtaattgctggcgttgagggagatatccttgatcctcgtaatacttatgaagatccaagtgtttggaatgataaagcggtagacttagcgaaacgttttgttaataactttgataagtttacagatactgataacggtaaagcgcttgttgctgctggtcctcagttataa

SEQ ID NO: 1272 - protein, 536 aa, Colwellia psychrerythraea
MTAPKNSIDLSQYGIDDVNEVVYNPSYELLFSEETKAGLEGFDKGIVTELGAVNVDTGIFTGRSPKDKYIVRDDVTRDTVWWSDQGKNDNKAMTPETWDHLKGLVTTQLSGQRLFVVDTFCGADEATRLKVRFITQVAWQAHFVKNMFIRPTDAELENYEPDFVVMNGAKTVNDKWEEQGLNSENFVAFNLTEKIQLIGGTWYGGEMKKGMFSMMNYYLPLQGIASMHCSANVGEDGDTAIFFGLSGTGKTTLSTDPKRQLIGDDEHGWDDNGVFNFEGGCYAKTINLSKENEPDIYNAIRRDALLENVTVDANGKIDFDDNSKTENTRVSYPIHHIDNIVKPVSRAGHAKKVIFLTADAFGVLPPVAKLTPEQTEYYFLSGFTAKLAGTERGITEPTPTFSSCFGAAFLSLHPTQYAEVLHKRMDDAGAEAYLVNTGWNGTGKRISIKATRAIIDAILDGSIDNAETETVPFFNLEVPKVIAGVEGDILDPRNTYEDPSVWNDKAVDLAKRFVNNFDKFTDTDNGKALVAAGPQL

SEQ ID NO: 1273 - DNA, 1623 bp, Escherichia coli O6
  CDS (1)..(1623): transl_table=11
atgcgcgttaacaatggtttgaccccgcaagaactcgaggcttatggtatcagtgacgtacatgatatcgtttacaacccaagctacgatctgctgtaccaggaagagctggacccgagcctgaccggttatgagcgcggggtgttaactaatctgggtgccgttgccgtcgataccgggatcttcaccggtcgttcaccgaaagataagtatatcgttcgtgacgataccactcgcgatactttctggtgggcagacaaaggcaaaggtaagaacgacaacaaacctctctctccggaaacctggcagcatctgaaaggcctggtgaccaggcagctttccggcaaacgtctgttcgttgtcgacgccttctgtggtgcgaacccggatactcgtctttccgtccgtttcatcaccgaagtggcctggcaggcgcattttgtcaaaaacatgtttattcgcccgagcgatgaagagctggcaggtttcaaaccagactttatcgttatgaacggcgcgaagtgcactaacccgcagtggaaagaacagggtctgaactccgaaaacttcgtggcgtttaacctgaccgagcgcatgcagctgattggcggcacctggtacggcggcgaaatgaagaaagggatgttctcgatgatgaactacctgctgccgctgaaaggtatcgcttctatgcactgctccgccaacgttggcgagaaaggcgatgttgcggtgttcttcggcctttccggcaccggtaaaaccaccctttccaccgacccgaaacgccgcctgattggcgatgacgagcacggctgggatgatgacggtgtgtttaacttcgaaggcggctgctacgcgaaaactatcaagctgtcgaaagaagcggaacctgaaatctacaacgctatccgtcgcgatgcgctgctggaaaacgtcaccgtgcgtgaagatggcacaatcgactttgatgatggttcaaaaaccgagaacacccgcgtttcttatccgatctatcacatcgataacatcgttaagccggtttccaaagcgggccacgcaacgaaagttatcttcctgacagcagacgcctttggtgtgctgccgccggtttctcgtctgactgccgatcaaacccagtaccacttcctctctggcttcaccgccaaactggccgggactgagcgtggcatcaccgaaccgacgccaaccttctccgcctgcttcggcgcggcgttcctgtcgctgcacccaactcagtacgcagaagtgctggtaaaacgtatgcaggcagcgggtgcgcaggcgtatctggttaacaccggctggaacggcactggcaaacgtatctccattaaagatacccgcgctattatcgacgccatcctcaacggttcgctggataacgcagaaaccttcactctgccgatgtttaacctggcgatcccaaccgaactgccgggcgtagacacgaagctcctcgatccgcgtaacacctacgcttctccggaacagtggcaggaaaaagccgaaacgctggcgaaactgtttatcgacaacttcgataaatacaccgacacccctgcgggtgccgcgctggtagcggctggtccgaagctgtaa

SEQ ID NO: 1274 - protein, 540 aa, Escherichia coli O6
MRVNNGLTPQELEAYGISDVHDIVYNPSYDLLYQEELDPSLTGYERGVLTNLGAVAVDTGIFTGRSPKDKYIVRDDTTRDTFWWADKGKGKNDNKPLSPETWQHLKGLVTRQLSGKRLFVVDAFCGANPDTRLSVRFITEVAWQAHFVKNMFIRPSDEELAGFKPDFIVMNGAKCTNPQWKEQGLNSENFVAFNLTERMQLIGGTWYGGEMKKGMFSMMNYLLPLKGIASMHCSANVGEKGDVAVFFGLSGTGKTTLSTDPKRRLIGDDEHGWDDDGVFNFEGGCYAKTIKLSKEAEPEIYNAIRRDALLENVTVREDGTIDFDDGSKTENTRVSYPIYHIDNIVKPVSKAGHATKVIFLTADAFGVLPPVSRLTADQTQYHFLSGFTAKLAGTERGITEPTPTFSACFGAAFLSLHPTQYAEVLVKRMQAAGAQAYLVNTGWNGTGKRISIKDTRAIIDAILNGSLDNAETFTLPMFNLAIPTELPGVDTKLLDPRNTYASPEQWQEKAETLAKLFIDNFDKYTDTPAGAALVAAGPKL

SEQ ID NO: 1275 - DNA, 1623 bp, Escherichia coli
  CDS (1)..(1623): transl_table=11
atgcgcgttaacaatggtttgaccccgcaagaactcgaggcttatggtatcagtgacgtacatgatatcgtttacaacccaagctacgacctgctgtatcaggaagagctcgatccgagcctgacaggttatgagcgcggggtgttaactaatctgggtgccgttgccgtcgataccgggatcttcaccggtcgttcaccaaaagataagtatatcgtccgtgacgataccactcgcgatactttctggtgggcagacaaaggcaaaggtaagaacgacaacaaacctctctctccggaaacctggcagcatctgaaaggcctggtgaccaggcagctttccggcaaacgtctgttcgttgtcgacgctttctgtggtgcgaacccggatactcgtctttccgtccgtttcatcaccgaagtggcctggcaggcgcattttgtcaaaaacatgtttattcgcccgagcgatgaagaactggcaggtttcaaaccagactttatcgttatgaacggcgcgaagtgcactaacccgcagtggaaagaacagggtctcaactccgaaaacttcgtggcgtttaacctgaccgagcgcatgcagctgattggcggcacctggtacggcggcgaaatgaagaaagggatgttctcgatgatgaactacctgctgccgctgaaaggtatcgcttctatgcactgctccgccaacgttggtgagaaaggcgatgttgcggtgttcttcggcctttccggcaccggtaaaaccaccctttccaccgacccgaaacgtcgcctgattggcgatgacgaacacggctgggacgatgacggcgtgtttaacttcgaaggcggctgctacgcaaaaactatcaagctgtcgaaagaagcggaacctgaaatctacaacgctatccgtcgtgatgcgttgctggaaaacgtcaccgtgcgtgaagatggcactatcgactttgatgatggttcaaaaaccgagaacacccgcgtttcttatccgatctatcacatcgataacattgttaagccggtttccaaagcgggccacgcgactaaggttatcttcctgactgctgatgctttcggcgtgttgccgccggtttctcgcctgactgccgatcaaacccagtatcacttcctctctggcttcaccgccaaactggccggtactgagcgtggcatcaccgaaccgacgccaaccttctccgcttgcttcggcgcggcattcctgtcgctgcacccgactcagtacgcagaagtgctggtgaaacgtatgcaggcggcgggcgcgcaggcttatctggttaacactggctggaacggcactggcaaacgtatctcgattaaagatacccgcgccattatcgacgccatcctcaacggttcgctggataatgcagaaaccttcactctgccgatgtttaacctggcgatcccaaccgaactgccgggcgtagacacgaagattctcgatccgcgtaacacctacgcttctccggaacagtggcaggaaaaagccgaaaccctggcgaaactgtttatcgacaacttcgataaatacaccgacacccctgcgggtgccgcgctggtagcggctggtccgaaactgtaa

SEQ ID NO: 1276 - protein, 540 aa, Escherichia coli
MRVNNGLTPQELEAYGISDVHDIVYNPSYDLLYQEELDPSLTGYERGVLTNLGAVAVDTGIFTGRSPKDKYIVRDDTTRDTFWWADKGKGKNDNKPLSPETWQHLKGLVTRQLSGKRLFVVDAFCGANPDTRLSVRFITEVAWQAHFVKNMFIRPSDEELAGFKPDFIVMNGAKCTNPQWKEQGLNSENFVAFNLTERMQLIGGTWYGGEMKKGMFSMMNYLLPLKGIASMHCSANVGEKGDVAVFFGLSGTGKTTLSTDPKRRLIGDDEHGWDDDGVFNFEGGCYAKTIKLSKEAEPEIYNAIRRDALLENVTVREDGTIDFDDGSKTENTRVSYPIYHIDNIVKPVSKAGHATKVIFLTADAFGVLPPVSRLTADQTQYHFLSGFTAKLAGTERGITEPTPTFSACFGAAFLSLHPTQYAEVLVKRMQAAGAQAYLVNTGWNGTGKRISIKDTRAIIDAILNGSLDNAETFTLPMFNLAIPTELPGVDTKILDPRNTYASPEQWQEKAETLAKLFIDNFDKYTDTPAGAALVAAGPKL

SEQ ID NO: 1277 - DNA, 1587 bp, Geobacillus kaustophilus
  CDS (1)..(1587): transl_table=11
atggggatcgcaaacatgacgaataagcttgatttattgctgcaaaaaccgtacgtgcatcatcaactgtccgtcgccgagctcgtcgagaaagtcctgcaacggaacgaaggacggctgacgcacaccggagccgtcgcggtgacaaccggcaagtacacagggcggtcgccgaaagacaaatacatcgtcgaagaaccgtcaacgaagcaaacgatcgactggggcgcggtcaaccagccgatgtctccggagacgtttgataaactgtacgacaaagtgctcgactatttaatgaagaaagatgaactgttcgtgtttaaaggctttgccggcgccgatccgaaataccggctgccgattcaagtcgtcaacgaattcgcctggcacaacttgttcgtccatcagctgttcattcggccgagcgccgcagagctcgccgcgcatgagccgcaattcaccgtcatttgcgcgccgaactttaaagccgacccgaaagttgacggcacgcgctcggaagcgttcatcatcatctcgtttgaacggcgcaccgtgttgatcggcggcaccgagtatgccggcgaaatgaaaaaatcgattttctcggtgatgaactatttgctgccggaacaaggcatcctgccgatgcactgctcggccaacgtcggccaggaaggcgacgtcgccctctttttcggcttgtcgggaacgggaaaaacgacgctctcgaccgacccgaaccgccgcttgatcggcgatgatgagcacggctggtcaaaccgcggcattttcaacatcgaaggcggctgctatgcgaaatgcatcaacctatcgcgcgagaaagagccgcaaatttttgacgccatcggcttcggcgcggtgctcgaaaacgtcgtcctcgacgacgcgacgcgggtgccgaattacgacgacggcacgctgacggaaaacacgcgcgccgcctacccgcttcaagcgatcaaaaacatcgtcgacccaagcgtcgccggccatccgtccacgatcgtgtttttgacggctgatgcgttcggcgtcctgccgccaatcagcaagctgacgcgcgaacaggcgatgtaccatttcttaagcggctacacaagcaaactcgccggcaccgaacgcggcgtcaccgaaccggaagcaacgttctcaacgtgctttggcgcaccgtttttgccgcgcccggccgtcgaatacgcggaaatgctcgggcaaaaaatcgccgaacacaacgtccgcgtctttttggtcaacaccggctggacagggggaccgtacggcgtcggcagccgcatgaagctcgcctacacccgggcgatggtgcaagccgccgtcgaaggggagctggacaacgtcgaaacggtgcaagacccgattttcggcctcgctatcccaagccacgtccccggcgtgccggatgacgtcctgcagccgcaaaacacatgggctgacaaacaagcgtacgaacaaaaagcaaaagagctggcgcaaaagttccgcgccaacttccgaaagttcgcccatatcgacccgacgatcgaaaaactcggcggaccgctcgtgtaa

SEQ ID NO: 1278 - protein, 528 aa, Geobacillus kaustophilus
MGIANMTNKLDLLLQKPYVHHQLSVAELVEKVLQRNEGRLTHTGAVAVTTGKYTGRSPKDKYIVEEPSTKQTIDWGAVNQPMSPETFDKLYDKVLDYLMKKDELFVFKGFAGADPKYRLPIQVVNEFAWHNLFVHQLFIRPSAAELAAHEPQFTVICAPNFKADPKVDGTRSEAFIIISFERRTVLIGGTEYAGEMKKSIFSVMNYLLPEQGILPMHCSANVGQEGDVALFFGLSGTGKTTLSTDPNRRLIGDDEHGWSNRGIFNIEGGCYAKCINLSREKEPQIFDAIGFGAVLENVVLDDATRVPNYDDGTLTENTRAAYPLQAIKNIVDPSVAGHPSTIVFLTADAFGVLPPISKLTREQAMYHFLSGYTSKLAGTERGVTEPEATFSTCFGAPFLPRPAVEYAEMLGQKIAEHNVRVFLVNTGWTGGPYGVGSRMKLAYTRAMVQAAVEGELDNVETVQDPIFGLAIPSHVPGVPDDVLQPQNTWADKQAYEQKAKELAQKFRANFRKFAHIDPTIEKLGGPLV

SEQ ID NO: 1279 - DNA, 1617 bp, Haemophilus ducreyi
  CDS (1)..(1617): transl_table=11
atgttaagccgtattgaacaagaactagcacaactaggcattactaacgtgaaagagatcgtacataatcctagttacgaacagctatttgaagaagaaatgaaacccggccttgatgggtttgaaaaaggtgtgctgacaaattctggtgcggtagcagttgatacgggtatttttacagggcgctcacccaaagataagtatattgtttatgatgaaacaacgaaagataatgtttggtggacatctgaagcggtaaaaaatgataataaaccgatgagccaaagcacttgggaaaatttaaaagatgtagtaacgcatcaattatctaacaaacgtttatttgtgattgatgctttttgtggcgcaagtaaaacgcatcgtttagcggttcgtattattactgaggtagcttggcaggcacattttgttaagaatatgtttattcgtccaacagcggacgaattaaaggtatttgaaccaaattttgtcgtgatgaacggctcaaaagtaaccaatccaaattggcaagcacaaggtttaaactcagaaaactttgttgcctttaacttgactgagcgtattcagttaattggtggtacttggtacggtggtgagatgaaaaaaggaatgttctcaatgatgaactacttgttgccacttaaaaatgttgcttcaatgcattgttctgctaacgtgggtaaagagggggatgtagcggttttctttggtttgtcgggcacaggtaaaactactctttctactgatccaaaacgtaagctaatcggtgatgatgaacatggctgggatgagcatggtgtgttcaactatgaaggtggttgttatgcgaaaacgattaatctgtctgaggaaaatgaaccagatatttatcgcgcgattcgccgtgatgcattattagaaaatgttgtggtggcggaagacggatctattgattttgctgataaatctaagactgaaaatacgcgtgtttcttatccaatctatcatattgataatattgttgaacctgtttcaaaagctggtcatgcacaaaaagttattttcttaaccgctgatgcgtttggtgtattgccaccggtggctaagttgacgccagaacagactaaatattatttcttatctggatttacggctaaattagccggcactgaacgtggtattactgaaccaacgccgactttctctgcgtgttttggtgcggcattcttatctttacatccgaccaaatatgcggaagtattagtgcaacggatggaagccgctggttcacaagcttacttggtaaataccggctggaatggaacaggtaaacgtatttcgattaaagatacgcgtggtattattgatgcgattttagatggttcaattgagaaagccacaacgcatgcgttgccagtgtttgacttgagggtgcctgatgctttaccgggtgttgatactgcaattttagatccgcgtgatacttatgcagaagcagcagaatggcatgctaaagctgaagatctagcggcacgttttgtgaaaaactttgaaaaatatactacgaacgaagagggcaaagcgttagtcgctgcggggcctcagctttcaaaatag

SEQ ID NO: 1280 - protein, 538 aa, Haemophilus ducreyi
MLSRIEQELAQLGITNVKEIVHNPSYEQLFEEEMKPGLDGFEKGVLTNSGAVAVDTGIFTGRSPKDKYIVYDETTKDNVWWTSEAVKNDNKPMSQSTWENLKDVVTHQLSNKRLFVIDAFCGASKTHRLAVRIITEVAWQAHFVKNMFIRPTADELKVFEPNFVVMNGSKVTNPNWQAQGLNSENFVAFNLTERIQLIGGTWYGGEMKKGMFSMMNYLLPLKNVASMHCSANVGKEGDVAVFFGLSGTGKTTLSTDPKRKLIGDDEHGWDEHGVFNYEGGCYAKTINLSEENEPDIYRAIRRDALLENVVVAEDGSIDFADKSKTENTRVSYPIYHIDNIVEPVSKAGHAQKVIFLTADAFGVLPPVAKLTPEQTKYYFLSGFTAKLAGTERGITEPTPTFSACFGAAFLSLHPTKYAEVLVQRMEAAGSQAYLVNTGWNGTGKRISIKDTRGIIDAILDGSIEKATTHALPVFDLRVPDALPGVDTAILDPRDTYAEAAEWHAKAEDLAARFVKNFEKYTTNEEGKALVAAGPQLSK

SEQ ID NO: 1281 - DNA, 1617 bp, Haemophilus influenzae
  CDS (1)..(1617): transl_table=11
atgacagacttaaataaagtggtaaaagaacttgaagctcttggcatttatgacgtaaaagaagttgtttacaatccaagctacgagcaattgttcgaagaagaaactaaaccaggcttagaaggctttgaaaaaggtactttaactacgactggtgcagtggcagtagatacaggtatcttcacaggtcgttctccaaaagataaatatatcgtgttagatgaaaaaacaaaagatactgtttggtggacatctgaaacagcaaaaaacgacaacaagccaatgaaccaagctacatggcaaagcttaaaagacttggtgactaaccaactttctcgtaaacgcttatttgtagttgatggtttctgtggtgcgagcgaacacgaccgtattgcagtacgtattgtcactgaagtagcgtggcaagcacattttgtaaaaaatatgtttattcgcccaactgaagaacaactcaaaaattttgaaccagatttcgttgtaatgaacggttctaaagtaaccaatccaaactggaaagaacaaggtttaaattcagaaaactttgttgctttcaacttgactgaacgcattcaattaatcggcggtacttggtacggcggcgaaatgaaaaaaggtatgtcctcaatgatgaactacttcctacctctcaaaggtgttggtgcaatgcactgctcagctaacgttggtaaagatggtgatgtagcaatcttcttcggcttatctggcacaggtaaaacaaccctttcaacggatccaaaacgtgaattaatcggtgacgatgaacacggctgggatgatgtgggtatctttaactttgaaggtggttgttatgcgaaaaccattcatctttcagaagaaaatgaaccagatatttaccgcgctatccgtcgcgacgcattattagaaaacgtggttgttcgttcagatggttctgttgatttcgatgatggttcaaaaacagaaaatactcgcgtgtcttacccaatttatcacatcgataacattgtaaaaccagtttctcgtgcaggtcacgcaactaaagtgattttcttaactgcagatgcatttggcgtattaccaccagtatctaaattgacaccagaacaaactaaatactacttcttatctggtttcactgcaaaattagcagggactgaacgtggtattactgaaccaactccaactttctcagcatgtttcggtgctgcgttcttaacccttcacccaactcaatatgctgaagtgttagtaaaacgtatgcaagcagcgggtgctgaagcttacttagtaaatactggttggaatggcacaggcaaacgtatctcaatcaaagatactcgtggaatcattgatgcaatcttagatggctcaattgaaaaagctgaaatgggcgaattgccaatcttcaacttagcaattcctaaagcattaccaggtgtagattctgcaatcttagatcctcgcgatacttacgcagataaagcacaatggcaatcaaaagctgaagacttagcaggtcgttttgtgaaaaactttgttaaatatgcaactaacgaagaaggcaaagctttaattgcagctggtcctaaagcttaa

SEQ ID NO: 1282 - protein, 538 aa, Haemophilus influenzae
MTDLNKVVKELEALGIYDVKEVVYNPSYEQLFEEETKPGLEGFEKGTLTTTGAVAVDTGIFTGRSPKDKYIVLDEKTKDTVWWTSETAKNDNKPMNQATWQSLKDLVTNQLSRKRLFVVDGFCGASEHDRIAVRIVTEVAWQAHFVKNMFIRPTEEQLKNFEPDFVVMNGSKVTNPNWKEQGLNSENFVAFNLTERIQLIGGTWYGGEMKKGMSSMMNYFLPLKGVGAMHCSANVGKDGDVAIFFGLSGTGKTTLSTDPKRELIGDDEHGWDDVGIFNFEGGCYAKTIHLSEENEPDIYRAIRRDALLENVVVRSDGSVDFDDGSKTENTRVSYPIYHIDNIVKPVSRAGHATKVIFLTADAFGVLPPVSKLTPEQTKYYFLSGFTAKLAGTERGITEPTPTFSACFGAAFLTLHPTQYAEVLVKRMQAAGAEAYLVNTGWNGTGKRISIKDTRGIIDAILDGSIEKAEMGELPIFNLAIPKALPGVDSAILDPRDTYADKAQWQSKAEDLAGRFVKNFVKYATNEEGKALIAAGPKA

SEQ ID NO: 1283 - DNA, 1602 bp, Idiomarina loihiensis
  CDS (1)..(1602): transl_table=11
atgcctaatctggatctgagccgctacggcatcacagatgtcgaagaaattgtccataatccgtcctacgacctgctattcgaagaggaaactcgcgacgacctgcaaggttatgaaaaaggaacggtaacggacctgggtgcggttgctgtcgataccggaattttcaccggacgttcccctaaagacaaatacattgtccgcgatgacacaactcgcgataccgtctggtgggctgaccaaggcaaaaacgacaacaaaccactatcgaccgaaacctggaatgaactgaaaggtttggtcactgagcagttgtcgcacaaacgtttgtttgtggttgatacctattgcggtgctaatgaagacactcgtcttgctgttcgcttcattaccgaagtggcatggcaggcacattttgtaaaaaacatgttcattcgcccaagcgaagaagagctggaaaactttgagccagacttcgttgtcatgaacggtgctaagtgcattaatcctaagtggcaggaacaggaactgaattcagaaaactttgtggcgtttaacttaactgaaaaaattcagttaattggcggcacctggtacggcggcgaaatgaaaaaaggtatgttctcaatgatgaactacttcctgccgctaaaaggcattgcttctatgcattgctctgccaacgttggtcaagaaggcgacgtagctgttttcttcggcttgtcaggcacgggtaaaaccaccctgtcgactgacccgaaacgcgcactcattggtgacgacgaacacggttgggatgacgacggcgtattcaactttgaaggcggttgttatgcgaaaaccattaacctgtcgaaagaagcggaaccggacatatacaacgcgattcgccgtgacgcactattagaaaacgttgctgttgatgacaacggtgttgtcgactttgatgacaactcgaaaaccgagaacactcgcgtgtcttaccctatttaccacattgacaacattgttaagccggtgtctaaagcgggtcacgcgaagaaagttattttcctgacggctgacgcgtttggcgtattaccgccggtgtctaagctgactaaagaacaggcgcagtatcatttcttgtccggctttactgctaaattagccggtactgagcgcggtgtcaccgagcctacgccaaccttctcaagctgttttggcgcggcgttcttaagcctgcacccaacgcagtacgcggaagttttagttaagcgtatggaagcggctggcgcagaagcttacctggttaacaccggatggaacggcactggcaagcgcatttctattaaagcgacgcgcgctattattgatgccattttagatggttcaattgaagacgctgaatttgtgcagttgcctcactttaacctcgctatgccaactgagctggccggtgttgaggacagtagcattctggacccacgtaaaacatacgaagatgacggtgagtgggacgttcgtgcgaaagacttagccgaacgttttgtcgcaaactttgagaaatttactgatactgataacggtaaagcgctggttgccgcaggccctcagttgtaa

SEQ ID NO: 1284 - protein, 533 aa, Idiomarina loihiensis
MPNLDLSRYGITDVEEIVHNPSYDLLFEEETRDDLQGYEKGTVTDLGAVAVDTGIFTGRSPKDKYIVRDDTTRDTVWWADQGKNDNKPLSTETWNELKGLVTEQLSHKRLFVVDTYCGANEDTRLAVRFITEVAWQAHFVKNMFIRPSEEELENFEPDFVVMNGAKCINPKWQEQELNSENFVAFNLTEKIQLIGGTWYGGEMKKGMFSMMNYFLPLKGIASMHCSANVGQEGDVAVFFGLSGTGKTTLSTDPKRALIGDDEHGWDDDGVFNFEGGCYAKTINLSKEAEPDIYNAIRRDALLENVAVDDNGVVDFDDNSKTENTRVSYPIYHIDNIVKPVSKAGHAKKVIFLTADAFGVLPPVSKLTKEQAQYHFLSGFTAKLAGTERGVTEPTPTFSSCFGAAFLSLHPTQYAEVLVKRMEAAGAEAYLVNTGWNGTGKRISIKATRAIIDAILDGSIEDAEFVQLPHFNLAMPTELAGVEDSSILDPRKTYEDDGEWDVRAKDLAERFVANFEKFTDTDNGKALVAAGPQL

SEQ ID NO: 1285 - DNA, 1617 bp, Mannheimia succiniciproducens
  CDS (1)..(1617): transl_table=11
atgacagatcttaatcaattaactcaagaacttggtgctttaggtattcatgatgtacaagaagttgtgtataacccgagctatgaacttctttttgcggaagaaaccaaaccaggtttagaaggttatgaaaaaggtactgtgactaatcaaggagcggttgctgtaaataccggtattttcaccggtcgttctccgaaagataaatatatcgttttagacgacaaaactaaagataccgtatggtggaccagcgaaaaagttaaaaacgataacaaaccaatgagccaagatacctggaacagtttgaaaggtttagttgccgatcaactttccggtaaacgtttatttgttgttgacgcattctgcggcgcgaataaagatacgcgtttagctgttcgtgtggttactgaagttgcatggcaggcgcattttgtaacaaatatgtttatccgcccttcagcggaagaattaaaaggtttcaaacctgatttcgtggtaatgaacggtgcaaaatgtacaaatcctaactggaaagaacaagggttaaattccgaaaacttcgttgcgttcaacattacagaaggcgttcaattaatcggcggtacttggtacggtggtgaaatgaaaaaaggtatgttctcaatgatgaactacttcttaccgcttcgtggtattgcatcaatgcactgttccgcaaacgttggtaaagacggcgataccgcaattttcttcggtttgtcaggcacaggtaaaacgacattatcaacagatcctaaacgtcaactaatcggtgatgacgaacacggttgggacgatgaaggcgtatttaacttcgaaggtggttgctacgcgaaaaccattaacttatccgctgaaaacgagccggatatctatggcgctatcaaacgtgacgcattattggaaaacgtggttgttttagataacggtgacgttgactatgcagacggttccaaaacagaaaatacacgtgtttcttatccgatttatcacattcaaaatatcgttaaacctgtttctaaagctggtccggcaactaaagttatcttcttgtctgccgatgcattcggtgtattaccgccggtgtctaaattaactccggaacaaaccaaatactatttcttatccggtttcactgcgaaattagcgggtacggaacgcggtattacagagcctacaccaacattctctgcatgttttggtgcggcttttttaagcttgcatccgacacaatatgccgaagtgttagtaaaacgtatgcaagaatcaggtgcggaagcgtatcttgttaatacaggttggaacggtaccggcaaacgtatctcaattaaagatacccgtggtattattgatgcaattttagacggctcaattgataaagcggaaatgggctcattaccaatcttcgatttctcaattcctaaagcattacctggtgttaaccctgcaatcttagatccgcgcgatacttatgcggataaagcgcaatgggaagaaaaagctcaagatcttgcaggtcgctttgtgaaaaactttgaaaaatataccggtacggcggaaggtcaggcattagttgctgccggtcctaaagcataa

SEQ ID NO: 1286 - protein, 538 aa, Mannheimia succiniciproducens
MTDLNQLTQELGALGIHDVQEVVYNPSYELLFAEETKPGLEGYEKGTVTNQGAVAVNTGIFTGRSPKDKYIVLDDKTKDTVWWTSEKVKNDNKPMSQDTWNSLKGLVADQLSGKRLFVVDAFCGANKDTRLAVRVVTEVAWQAHFVTNMFIRPSAEELKGFKPDFVVMNGAKCTNPNWKEQGLNSENFVAFNITEGVQLIGGTWYGGEMKKGMFSMMNYFLPLRGIASMHCSANVGKDGDTAIFFGLSGTGKTTLSTDPKRQLIGDDEHGWDDEGVFNFEGGCYAKTINLSAENEPDIYGAIKRDALLENVVVLDNGDVDYADGSKTENTRVSYPIYHIQNIVKPVSKAGPATKVIFLSADAFGVLPPVSKLTPEQTKYYFLSGFTAKLAGTERGITEPTPTFSACFGAAFLSLHPTQYAEVLVKRMQESGAEAYLVNTGWNGTGKRISIKDTRGIIDAILDGSIDKAEMGSLPIFDFSIPKALPGVNPAILDPRDTYADKAQWEEKAQDLAGRFVKNFEKYTGTAEGQALVAAGPKA

SEQ ID NO: 1287 - DNA, 1584 bp, Oceanobacillus iheyensis
  CDS (1)..(1584): transl_table=11
atgaaaactgttgataagtcttatatgaaagaattacaaacaaatcatattcaccacaatctatcggtagcacagctcgttgaaaaaattctgtatagacaagaaggaattcttacatctaccggagcagtacgcgccactacaggaacttatactggtcgatctccggaagataaatttaccgttaaagatgaagtttcggatcaacatgttaactggggtaaagttaataaacccatccaggaggaagtattcaaccaattattatctaaagtgatttcttatttaaatgaaaaacaagaaatatttaaatttcaaggatttgcggggtctgatcatacttaccgactccctattcaagtgattaatgaatatgcttggcataatttattttctagacaactattcattactccaacggaagaggaattaaacaatcaccaagcagaatttacagttatttcagctccaggatttaaggctgatccagctattgatggaacaaattcagaaacatttatattaatttcttttaagaaaagaattgtacttatcggtggtactgaatatgccggagaaattaaaaagtccattttttctgtgatgaattatttattaccacagcaagatgtgctttctatgcattgctccgctaatgtaggccaggaaggtgacgttgcattatttttcgggttatcaggtaccgggaaaacgacattatccgcagacccctaccgaaaattaatcggtgatgacgaacatggttggagtccaaatggtgtattcaatattgaaggcggttgttatgcgaaatgtatcaatctctcagaagaaaaggaaccacaaatttataacgcaatccgttacggtactgtgttagagaatgtgattttaaatgacaatagcagagaacccgattatgatgatacttcattaacagaaaacacacgtgctgcttatcctttagagaatatagacaatattattaatcctagtgttgcagggcatccaaatacaattattttcttaactgctgacgcatcaggcacattgcctccgattagcaaactgacaaaagaacaagcgatgtatcattttctaagcggatatacaagtaaattagcaggaacagaacgaggagtaacagaaccactagctactttctctgcttgttttggttctccattcttaccattagctccatctaaatatgcagaaatgcttggaaagaaaattgatatgtttgatacaaatgtatttttgattaataccggatggactggcggatcatatggagtgggtgaccgtattaaactttccttcaccagagcaatggttcactctgcattagaaggagaattaaattctatagaaacaatcactgatgaaattttcggtttacagattcctgctcatgttcctggagtccctgatgaattattagtacctaaacagacatggggtaataaagaagcatatatgaaagaagcacaaacacttgcattaaaattccacgaaaactttaagaaattcactctagctagtgaaacgattaagcaagctggtcctttatataaaggataa

SEQ ID NO: 1288 - protein, 527 aa, Oceanobacillus iheyensis
MKTVDKSYMKELQTNHIHHNLSVAQLVEKILYRQEGILTSTGAVRATTGTYTGRSPEDKFTVKDEVSDQHVNWGKVNKPIQEEVFNQLLSKVISYLNEKQEIFKFQGFAGSDHTYRLPIQVINEYAWHNLFSRQLFITPTEEELNNHQAEFTVISAPGFKADPAIDGTNSETFILISFKKRIVLIGGTEYAGEIKKSIFSVMNYLLPQQDVLSMHCSANVGQEGDVALFFGLSGTGKTTLSADPYRKLIGDDEHGWSPNGVFNIEGGCYAKCINLSEEKEPQIYNAIRYGTVLENVILNDNSREPDYDDTSLTENTRAAYPLENIDNIINPSVAGHPNTIIFLTADASGTLPPISKLTKEQAMYHFLSGYTSKLAGTERGVTEPLATFSACFGSPFLPLAPSKYAEMLGKKIDMFDTNVFLINTGWTGGSYGVGDRIKLSFTRAMVHSALEGELNSIETITDEIFGLQIPAHVPGVPDELLVPKQTWGNKEAYMKEAQTLALKFHENFKKFTLASETIKQAGPLYKG

SEQ ID NO: 1289 - DNA, 1617 bp, Pasteurella multocida
  CDS (1)..(1617): transl_table=11
atgactgacttaaataaagtaatcaatgaacttggtgcacttggtattcatgatgtaaaagaaatcgtttataacccaagttatgagcaattgttcgaagaggaaaccaaaccaggtttagaaggttacgaaaaaggtatcgtgacacaatcaggcgcggtggcggttgataccggtatctttacaggtcgttcgccaaaagataaatacattgtgcttgatgacaaaaccaaagacactgtttggtggacaagcgatgcggcgaaaaacgataacaaaccaatgacacaagatacgtggaaaagcttaaaaggcttagtgacagaacaactttctggcaaacgtttatttgtgatcgacgcattctgtggtgcaaacgctgacacccgtttatcagtgcgtatcgtgacagaagtagcatggcaagcacactttgtgaaaaacatgttcattcgtccaacagaagcagaattagttggcttcaaaccagatttcgtagtaatgaacggttctaaagtaaccaacccgaactggaaagaacaaggtctaaattctgaaaactttgtggcatttaacttaactgaaggcgtgcaattaatcggtggtacttggtacggcggtgaaatgaaaaaaggtatgttctcaatgatgaactacttcttaccattaaaaggcatcgcatctatgcactgttcagccaacgtgggtgaaaaaggcgacgttgctgtgttcttcggtttatcaggtacaggtaaaaccaccctttcaacagatccaaaacgtcaattaatcggtgacgatgagcacggttgggatgatgatggcgtattcaactacgaaggtggttgctatgcgaaaacgatcaaactgtctccagaaaacgaaccagatatctataaagccatcaaacgtgatgccttattagaaaacgttgtagtacgtgcagatggttcagtggattacgatgatggttcaaaaacagaaaacacccgtgtttcttacccaatttaccacatcgacaacatcgtaacaccggtatcaaaagcaggtcatgcgaaaaaagtgatcttcttaactgcggacgcattcggtgtgttaccaccagtatctaaattaacgccagaacaaactaaatactacttcttatctggtttcaccgcgaaattagccggtactgagcgtggtatcacagaaccaacaccaacgttctctgcatgtttcggtgcagcgttcttatcacttcacccaacacaatatgcggaagtgttagtgaaacgtatggaagcagcgggtgcggaagcttacttagtgaacacaggttggaacggtacaggtaaacgtatctcaatcaaagatacgcgcggtatcatcgatgcaatcttagacggttcaatcgaaaaagcagaaatgggcaaattaccaatctttgatttagcgatcccaactgcattaccaggtgttgaccctgcaatcttagatccacgtgatacttatgcagacaaagcacaatggcaagcgaaagcagaagacttagctggtcgtttcgtgaaaaacttcgaaaaatacaccactaacgatgaaggtaaagcattagtggcagcaggtccaaaagcgtaa

SEQ ID NO: 1290 - protein, 538 aa, Pasteurella multocida
MTDLNKVINELGALGIHDVKEIVYNPSYEQLFEEETKPGLEGYEKGIVTQSGAVAVDTGIFTGRSPKDKYIVLDDKTKDTVWWTSDAAKNDNKPMTQDTWKSLKGLVTEQLSGKRLFVIDAFCGANADTRLSVRIVTEVAWQAHFVKNMFIRPTEAELVGFKPDFVVMNGSKVTNPNWKEQGLNSENFVAFNLTEGVQLIGGTWYGGEMKKGMFSMMNYFLPLKGIASMHCSANVGEKGDVAVFFGLSGTGKTTLSTDPKRQLIGDDEHGWDDDGVFNYEGGCYAKTIKLSPENEPDIYKAIKRDALLENVVVRADGSVDYDDGSKTENTRVSYPIYHIDNIVTPVSKAGHAKKVIFLTADAFGVLPPVSKLTPEQTKYYFLSGFTAKLAGTERGITEPTPTFSACFGAAFLSLHPTQYAEVLVKRMEAAGAEAYLVNTGWNGTGKRISIKDTRGIIDAILDGSIEKAEMGKLPIFDLAIPTALPGVDPAILDPRDTYADKAQWQAKAEDLAGRFVKNFEKYTTNDEGKALVAAGPKA

SEQ ID NO: 1291 - DNA, 1608 bp, Porphyromonas gingivalis
  CDS (1)..(1608): transl_table=11
atgagcaaattagatttgacaaagtatggcattctcaatgccactgagattatccacaacccatcttacgagttcctttttgaagaagagaccaaagccggtctcgaaggctttgagaaaggacagcttaccgaactgggagcagtcaatgtgatgaccggtgtctatacgggtcgttcgcccaaggataagttcttcgtcatggacgatacaaccaaaaacaccatctggtggacgtcggacgaatacaagaacgacaacaaaccggtgactccggaggcgtggaagagtatcaaaaagctggccgtggagcagctctccggcaagcgtcttttcgtcgtggacacgttctgcggcgccaacgaaagctctcggttgaaaatccgctttatcatggaggtggcctggcaggcccacttcgtcaagaatatgtttatccgccccacggaagaggagctggccaactacggcgagcccgacttcgtggtgatgactgcttccaaagcgaaggtggaaaactacaaagagctgggactgaactccgagacggccgtcgtattcaacctgaccgagaaggtgcaagtgatcctgaacacatggtacggcggtgagatgaagaaaggtatgttctcctacatgaactacctgctccctctgcgcggtatggcttcgatgcactgctccgccaatacgagcatggacgagaaggagacggctatcttcttcggtctgtccggtacgggcaagaccacgctcagtacggatccgaagcgcaagctgatcggcgatgacgagcacggctgggacaaggacggtatcttcaacttcgaaggcggatgctacgccaaggtgatcaacctgagccgcgagaacgaaccggacatctacaatgccattcgtcgcaatgcgctgctggagaacgtgaccgtggatgctgccggtaagatcgacttcggtgacaaatccgtgacggagaatactcgcgtctcttatccgatctaccacatcgagaacatcgtgaagcccgtgtccaaagccggccatgccaagaaggtgatcttcctctcggccgatgctttcggcgtattgcctcccgtttccatcctgactccggagcagaccaagtattacttcctctcgggctttaccgccaagctggccggtaccgagcgtggcatcacggagcctacgcctacgttctccgcttgcttcggagcggctttcctctcgcttcatcctacgaagtatgccgaggagctggtgaagaaaatggagatggtgggagctacggcttacctcgtcaatacgggttggaacggtacgggcaagcgcatctctatcaaggatacgcgtggtatcatcgatgccatcctcgacggctccatcgacaaggctccgaccaaggctattcctttcttcgacttcaaggtgccgacggctctgcccggtgtggatccgaatatcctcgatccgcgcgacacctatgccgatgccgccgagtggacgacgaaagcgaaggatctggccgaacgtttcatcaaaaacttcgtcaagttcacgggcaatgatgccggcaaggctctcgtagcagcagggccgaagctctaa

SEQ ID NO: 1292 - protein, 535 aa, Porphyromonas gingivalis
MSKLDLTKYGILNATEIIHNPSYEFLFEEETKAGLEGFEKGQLTELGAVNVMTGVYTGRSPKDKFFVMDDTTKNTIWWTSDEYKNDNKPVTPEAWKSIKKLAVEQLSGKRLFVVDTFCGANESSRLKIRFIMEVAWQAHFVKNMFIRPTEEELANYGEPDFVVMTASKAKVENYKELGLNSETAVVFNLTEKVQVILNTWYGGEMKKGMFSYMNYLLPLRGMASMHCSANTSMDEKETAIFFGLSGTGKTTLSTDPKRKLIGDDEHGWDKDGIFNFEGGCYAKVINLSRENEPDIYNAIRRNALLENVTVDAAGKIDFGDKSVTENTRVSYPIYHIENIVKPVSKAGHAKKVIFLSADAFGVLPPVSILTPEQTKYYFLSGFTAKLAGTERGITEPTPTFSACFGAAFLSLHPTKYAEELVKKMEMVGATAYLVNTGWNGTGKRISIKDTRGIIDAILDGSIDKAPTKAIPFFDFKVPTALPGVDPNILDPRDTYADAAEWTTKAKDLAERFIKNFVKFTGNDAGKALVAAGPKL

SEQ ID NO: 1293 - DNA, 1545 bp, Pseudomonas fluorescens
  CDS (1)..(1545): transl_table=11
atgacgcaagccaataacgccgtgtacaccgatctgagtgtggatgatctggtcaaagaagccctgaaccgcggtgagggcgagcttgccgataccggcgctctggtggttcgcaccggtcatcgtaccggccgttcgccagtggatcgtttcatcgtagaagagcccagcacccaggacgctatcgcctggggcccgatcaaccgcaagttcccggcggccaagttcgacgccctgtgggaccgcgttgaagcctacctgggcgagcgcgagcgttttgtttcccatgtgcatgtaggttccgatccggcgcactacctgccggtgaaaatgaccaccgagaccgcctggcacaacctgttcggccgctgcctgttcatcaaccccgagcagtacaacgccggtggcaaggatgagtggcagatcctcaacgcgccgaacttcgtctgcgagccagagcgcgacggcaccaactccgatggcaccgtgatcctcaacttcgcggccaagaaagtgctgatcgccggcatgcgctacgccggtgaaatgaagaaagccctgttctccgtgcagaacttcctgctgccggctgccgacgtactgccgatgcactgcgccgccaacatgggcgaagaaggcgacgtgaccctgttcttcggtctgtcgggcaccggcaagaccaccctgtccgctgacgaaagccgttacctgatcggtgacgacgaacacggttggggcgtgggcgtggtgttcaacatcgaaggcggttgctatgccaagtgcatcgacctgtcggaaaagaacgagccggtgatctggaaagccatccagcacggtgccgttctggaaaacgtggtgatcgacccggtcaccaagaaagccgactacgccgacgacagcctgacccagaacagccgcgccgcctacccgcgcgagctgatcgaaaaacgcgcaccgaagaacctcggtggcgagcctaacgccgtgatcttcctgacctgcgacctgaccggcgtactgccgccggtgtcgatcctcagcgaagaacaagccgcctaccacttcctgtccggctacaccgctctggtgggctcgactgaaatgggttcgggctcgggcatcaagtcgaccttctccacctgcttcggcgcaccgttcttcccgcgtccggcgggcgaatacgccgagctgctgatcaagcgcatccgcggcttcggctccaaggtctacctggtcaacaccggctggaccggcggtggctacggcgtgggcaaacgcttcaacatccccaccacccgtggcgtgattgcagcgatccagagcggcgcgctgatcggtgccgagaccgagcacctggacatcgtcaacctggacgtgccaaaagccgtaccgggcgtcgagaccggcctgctcaacccacgcaacacctgggctgacaaagctgcctacgacgaagccgccaaggccctggccggcctgttcatcgagaacttcaagaagttcgacgtgagcgacgcgatcaaggctgctggtccgaagctgtaa

SEQ ID NO: 1294 - protein, 514 aa, Pseudomonas fluorescens [sequence omitted]

SEQ ID NO: 1295 - DNA, 1611 bp, Rhizobium loti
  CDS (1)..(1611): transl_table=11
atgtcggaagtcggcaaacgcaatcctgcttgcccgatcgatcgtatcggcctgaaaaccaccggtatggtgcgctataattttggcgcggccgccctttacgaggaggcgatccggcgtggcgaggcccggttgaccgcgcatggcgcgctggtcgccgagaccggccagcacacaggccgttcgcccaaggacaagttcgtcgtccgtgacgccgccacggagcctgaagtctggtgggacaacaacaaggcgatctcgccggcccagttcgaaacgctgttcgccgatttccttgcccacgccgcgaacaaggatctctatgttcaggacctcgtcggcggcgccgacgccgagctgaaactgccgacgcgcgtaatcaccgagtttgcctggcactcgctgttcatccgcaatctgctcatccgtccggacaaggccgaactcggacagttcgtgcctgagatgacgatcatcgacctgccgtccttccgcgccgaccccgcccgccacggcagccgcacggaaacggtgatcgctgtcgacctcacccgccagatcgtgctgatcggcggcacctcctatgccggcgagatgaagaagtcggtattcaccatgctcaactatatcctgccgcagaagggcgtgatgccgatgcactgttcggccaatgaggggccggccggcgatgcggccgtcttcttcgggctttccggaaccggcaagacgacgctgtcggccgatccgtcgcgcacgctgatcggcgacgatgagcatggctggggcccgcacggcatcttcaatttcgaaggcggctgctacgccaagacgatcaagctgtcggccgaagccgagccggagatattcgccaccacgcagcgctttggcacggtgctggaaaatgtcgtgctcgacgccgacggcgtgccggacttcaacgacggccgcctcaccgaaaacacacgctgcgcctacccgctcgacttcatccccaatgcctcgaagaccgggcgcgccagtcatcccaaaaacatcatcatgctgaccgccgatgccttcggcgtgatgccgccgatcgcgcggctgacccctgcgcaggcgatgtatcatttcctctccggctatacggccaaggtggccggaaccgaaaagggcgtcaccgaacccgaggcgacgttctcgacctgcttcggtgccccgttcatgccgcgccatccgtcggaatacggcaatctgctgcgcgagctcatcgccagccacggcgccgattgctggctggtcaacaccggctggaccggcggcgcctacggcaccggcaagcgcatgccgatcaaggcgacgcgcgctctgctgaccgccgcgctcgacggatcgctgaagacaggcgaattccgcaccgacgccaatttcggcttcgaggtgccggtggcggtgcctggcgtcgacagcgccattctcgacccgcgctcgacctgggccgacaagcctgcctatgaccgccaggcggcaagactggtcggcatgttcgccgtcaacttcgaaaaattcgagccgcatgtcgatgccaccgtcatgggcgcggcgccccggatgcaggaagcggcggagtag

SEQ ID NO: 1296 - protein, 536 aa, Rhizobium loti
MSEVGKRNPACPIDRIGLKTTGMVRYNFGAAALYEEAIRRGEARLTAHGALVAETGQHTGRSPKDKFVVRDAATEPEVWWDNNKAISPAQFETLFADFLAHAANKDLYVQDLVGGADAELKLPTRVITEFAWHSLFIRNLLIRPDKAELGQFVPEMTIIDLPSFRADPARHGSRTETVIAVDLTRQIVLIGGTSYAGEMKKSVFTMLNYILPQKGVMPMHCSANEGPAGDAAVFFGLSGTGKTTLSADPSRTLIGDDEHGWGPHGIFNFEGGCYAKTIKLSAEAEPEIFATTQRFGTVLENVVLDADGVPDFNDGRLTENTRCAYPLDFIPNASKTGRASHPKNIIMLTADAFGVMPPIARLTPAQAMYHFLSGYTAKVAGTEKGVTEPEATFSTCFGAPFMPRHPSEYGNLLRELIASHGADCWLVNTGWTGGAYGTGKRMPIKATRALLTAALDGSLKTGEFRTDANFGFEVPVAVPGVDSAILDPRSTWADKPAYDRQAARLVGMFAVNFEKFEPHVDATVMGAAPRMQEAAE

SEQ ID NO: 1297 - DNA, 1976 bp, Rhizobium meliloti
  CDS (206)..(1816): transl_table=11
gatccggtttccccgcaattggcctcgcaggtgggtttccggaagctgcgattcaaccgattaaaaaatgcatatttttctttaaatcgattaatatactgaattcattatccttttagaattggctatcttgtcttgggtcagccttgccggtatgttccgacgaaattcaacgccaatggccaaacacgaaggaagcttgaccatggatgagctcggcagccgcaatccctctatcggactggaatcgatcggattttccgacctgtcggtggtccgctacaacttcgaggcggcgcagctttacgaagaagccctggcccgcggtgaagccgaattgacggcccatggcgcgctttgcgcccgcaccggccagcacacgggccgctcgcccaaggacaagtatgtcgtgcgcgacgccaacacggccgaccagatctggtgggacaacaacagcgcgatttcgccggagcatttcgaggttcttcgtcgggacatgctcgcgcatgcaaagggcatgtcgctgtatgtccaggacctcgtcggcggtgccgacccggagaacgcgctgccgacgcgcgtcgttaccgagttcgcctggcactcgctgttcatccgcaatctgttgatccgcccggagcgcgaggcgcttccgtcttttcagccgaagctcacgatcatcgacctgccgagcttcaaggccgatcccgtacgccacggctgccgcagcgagacggtcatcgcctgcgacctgaccaacggcctcgtgctgatcggcggtacttcctatgcgggcgagatgaagaagtcggttttcaccgttctcaattacctgctgcccgagaagtcggtgatgccgatgcactgctcggccaatgtcgggcccgccggcgacacggcgatcttcttcggcctctcgggcaccggcaagacgacgctctccgccgatccgaaccgtaccctgatcggtgacgacgagcacggctggagcgaaaagggcgtcttcaatttcgagggcggctgctatgccaaggcgatccgcctttcggaagcggccgagcccgagatctttgcgacgacgcggcgcttcggtaccgtgatggagaacgtcgtcctcgacgagcggcgccttcctgacttcgacgacggctcgctgacggagaacacccgctgcgcctatccgctgcacttcattccgaacgccagcaagaccggcacggcgccgcagccgcgcacgatcatcatgctgacggcggacgccttcggggttctgccgccgatcgccaagctgacgccggaacaggccatgtatcacttcctctccggctacaccgccaaggttgccggcaccgaaaagggcgtgacggagccggaggcgactttctcgacctgcttcggcgcacccttcatgccgcgccatccgtccgaatacggcaatcttctcaaggacctcatcgccaggaacggcgtcacctgctggctcgtcaacaccggctggaccggcggcgcctttggcacgggaagccgcatgccgatcaaggtgacgcgcgcgcttctttcggcagcgctcgacggctcgctgaacaacgcctcgttccgcacggatgcgaatttcggcttcgcggtgccggtgtcggtaccgggcgtcgaggccggcattctcgacccgcgctcgacctgggcggatggcgtggcttatgacacccaggcacggcgcctcgtcgacatgttcattgccaacttcgccaagttcgagcgccatgtcgacggcagcgtgcgcgacgcagccccgggcgcgagggtggccgccgaataaaccggtctcttgccatgattcacgtgaaacccggctgcctgcggccgggttttgcatttgcggctggttttcaggcatgcgatagaacggccgaggaagaaccatggcaagcgaaccgctttacatcaacgaaaacatcgtgatcgccggatgggagctc

SEQ ID NO: 1298 - protein, 536 aa, Rhizobium meliloti
MDELGSRNPSIGLESIGFSDLSVVRYNFEAAQLYEEALARGEAELTAHGALCARTGQHTGRSPKDKYVVRDANTADQIWWDNNSAISPEHFEVLRRDMLAHAKGMSLYVQDLVGGADPENALPTRVVTEFAWHSLFIRNLLIRPEREALPSFQPKLTIIDLPSFKADPVRHGCRSETVIACDLTNGLVLIGGTSYAGEMKKSVFTVLNYLLPEKSVMPMHCSANVGPAGDTAIFFGLSGTGKTTLSADPNRTLIGDDEHGWSEKGVFNFEGGCYAKAIRLSEAAEPEIFATTRRFGTVMENVVLDERRLPDFDDGSLTENTRCAYPLHFIPNASKTGTAPQPRTIIMLTADAFGVLPPIAKLTPEQAMYHFLSGYTAKVAGTEKGVTEPEATFSTCFGAPFMPRHPSEYGNLLKDLIARNGVTCWLVNTGWTGGAFGTGSRMPIKVTRALLSAALDGSLNNASFRTDANFGFAVPVSVPGVEAGILDPRSTWADGVAYDTQARRLVDMFIANFAKFERHVDGSVRDAAPGARVAAE

SEQ ID NO: 1299 - DNA, 1599 bp, Rhodobacter sphaeroides
  CDS (1)..(1599): transl_table=11
atgaatttcggacgcgtgaacccagcgcagacgctggacgcacaaggcatcactggacttggcgaggtgcattacaacctcatcgagcccgcgctggtcgaagcggccgtgacgcgcggcgaaggccggctgggccgcggaggcgcgttcctctgctcgaccggtgccttcacgggccgctcgcccaaggacaagttcgtcgtgcgcacgccgtcggtggaagacacgatctggtgggagaacaacgctcccatggatccggccgccttcgaccggctccatgccgacatgctcgagcacatgaagggccgcacctacttcgtgcaggacctgttcgccggcgccgaccccgagctgcgcctcgacgtgcggatggtgaccgaactcgcctggcacggcctcttcatccgccacatgctgcgccgccccgagcgcgccgagctcgacagcttcgtgcccgactggacggtcatcaactgcccgtccttcaaggccgaccccgagcgccacggctgccgcaccgacacggtgatcgtgctcaacttcgagcgcaagctgatcctgatcgccaacaccgaatatgccggcgagaacaagaagtcggtcttcacgctgctgaactacatcctgcccggcaagggcgtcatggcgatgcactgctcggccaaccacgcgctcggcgacacggacgatgcggcagtgttcttcgggctctccggcaccggcaagaccacgctctcggccgatccctcccgcacgctgatcggcgacgacgagcacggctggtcggaccggggaaccttcaacttcgagggcggctgctacgccaagacgatcaatctctcggccgaagccgaacccgagatctatgccacgacctcgaagttcgcgaccgtggtcgagaacatggtctatgacgaagagacgctcgagctcgacttcaacgacgacagcctgacggcgaacacgcgctgcgcctatccgctcgactatatctcgaacgcgtccgagagcgggctcggcgggcatccgaagaacgtcatcatgctgacctgcgacgccttcggcgtgctgccgcccatcgcgcggctgacgcccgcgcaggccatgtatcacttcctgtcgggcttcacctcgaaggtggccggcaccgaacgtggcgtgaccgagccgcagccgaccttctcgacctgcttcggcgcgcccttcatgccgcggcgccccgaggtttacggcaagctcctgcaggagaagatcgccaagcacggcgcaacctgctggctcgtgaacaccggctggaccggcggcgcctacggcaccggcaagcggatgccgatcaaggccacccgcgcgctgctgaccgcggcgctcgacggctcgctctcgggcgttcagttccgccgcgatccgaacttcggcttcgaggtgccggtggacctgcatggggtagatgcgaagctgctcgatccgcgctcgacctgggccgatccggcggcctacgatcagcaggcgaagaagctggtggagatgttcgccaacaacttcgcgcaatatgtccccttcatcgatgcggatgtgaaggcggccgcgatcggctga

SEQ ID NO: 1300 - protein, 532 aa, Rhodobacter sphaeroides
MNFGRVNPAQTLDAQGITGLGEVHYNLIEPALVEAAVTRGEGRLGRGGAFLCSTGAFTGRSPKDKFVVRTPSVEDTIWWENNAPMDPAAFDRLHADMLEHMKGRTYFVQDLFAGADPELRLDVRMVTELAWHGLFIRHMLRRPERAELDSFVPDWTVINCPSFKADPERHGCRTDTVIVLNFERKLILIANTEYAGENKKSVFTLLNYILPGKGVMAMHCSANHALGDTDDAAVFFGLSGTGKTTLSADPSRTLIGDDEHGWSDRGTFNFEGGCYAKTINLSAEAEPEIYATTSKFATVVENMVYDEETLELDFNDDSLTANTRCAYPLDYISNASESGLGGHPKNVIMLTCDAFGVLPPIARLTPAQAMYHFLSGFTSKVAGTERGVTEPQPTFSTCFGAPFMPRRPEVYGKLLQEKIAKHGATCWLVNTGWTGGAYGTGKRMPIKATRALLTAALDGSLSGVQFRRDPNFGFEVPVDLHGVDAKLLDPRSTWADPAAYDQQAKKLVEMFANNFAQYVPFIDADVKAAAIG

SEQ ID NO: 1301 - DNA, 1620 bp, Salmonella paratyphi
  CDS (1)..(1620): transl_table=11
atgcgcgttaacaatttaaccccgcaagatctcaaggcttatggtatcaacgacgtccaggatatcgtttacaatcccagctacgacaccctttatcaggaagaacttaatcctggtctggaaggctatgagcgtggcgtgttaactaacctgggcgctgttgccgttgataccggtatttttaccggtcgttcgcctaaggataagtatattgttcgcgacgacaccacgcgtgatacgctgtggtggtccgataagggtaaaggtaaaaacgataataagccgctttcccaggaaacctggcaacacctgaaaggtctggtgacgcatcagctttccggtaaacgcttattcattgttgatgcgttctgcggcgcaaatgccgatacgcgtctttccgtgcgctttattacggaagtcgcctggcaggcccacttcgttaaaaatatgttcattcgcccaacggacgaagagctggtaggcttcaaacctgactttattgtcatgaacggcgcgaagtgcaccaacccgcagtggaaagagcaagggctgaactcggaaaacttcgtggcgttcaacctgactgaacgtattcagcttattggcggcacctggtacggcggcgaaatgaaaaaagggatgttctcggtaatgaactacctgctgccgctcaaaggtatcgcctcaatgcactgttccgccaacgtgggtgaaaaaggcgatgtcgcggtcttcttcggcctttccggtaccggaaaaaccactctctccaccgacccgaaacgtcgtctgattggcgatgatgagcacggttgggatgacgacggcgtgttcaactttgaaggcggctgctacgccaaaaccatcaaactgtcgaaagaagcggagccagaaatttatcatgcgattcgccgtgatgcgttgctggaaaacgtcaccgtgcgcgaagacggcaccgttgatttcgacgatggttccaaaaccgaaaacacccgcgtctcttacccgatctatcatatcgataacatcgttaagcccgtatccaaagcaggtcacgccaccaaggttatcttcctgacggcggatgctttcggcgtgttgccgccggtttcccgtttaaccgctaaccagacgcagtaccacttcctgtcgggtttcaccgctaaactggccggcaccgaacgcggcgtcaccgaaccgacccccaccttctccgcctgcttcggcgccgcgttcctgacgctgcacccgacgcagtatgctgaggtgctggtgaaacgtatgcaggcagcaggcgcgcaggcttatctggttaacaccggctggaatggcaccggcaaacgtatctccatcaaagatacgcgcgcgattattgacgccattctgaacggttctcttgataacgcggaaaccttccgtctgccgctgttcgatctggcgatcccgactgaactgcctggcgtggatacccacattctcgacccgcgtaacacctacgcgtcgccggaacaatggcaggaaaaagccaccgcgctggcgaaactgttcattgagaacttcgagaagtatacggataccccggcaggcgaagcgctggttagcgccggaccgaagctgtaa

SEQ ID NO: 1302 - protein, 539 aa, Salmonella paratyphi
MRVNNLTPQDLKAYGINDVQDIVYNPSYDTLYQEELNPGLEGYERGVLTNLGAVAVDTGIFTGRSPKDKYIVRDDTTRDTLWWSDKGKGKNDNKPLSQETWQHLKGLVTHQLSGKRLFIVDAFCGANADTRLSVRFITEVAWQAHFVKNMFIRPTDEELVGFKPDFIVMNGAKCTNPQWKEQGLNSENFVAFNLTERIQLIGGTWYGGEMKKGMFSVMNYLLPLKGIASMHCSANVGEKGDVAVFFGLSGTGKTTLSTDPKRRLIGDDEHGWDDDGVFNFEGGCYAKTIKLSKEAEPEIYHAIRRDALLENVTVREDGTVDFDDGSKTENTRVSYPIYHIDNIVKPVSKAGHATKVIFLTADAFGVLPPVSRLTANQTQYHFLSGFTAKLAGTERGVTEPTPTFSACFGAAFLTLHPTQYAEVLVKRMQAAGAQAYLVNTGWNGTGKRISIKDTRAIIDAILNGSLDNAETFRLPLFDLAIPTELPGVDTHILDPRNTYASPEQWQEKATALAKLFIENFEKYTDTPAGEALVSAGPKL

SEQ ID NO: 1303 - DNA, 1617 bp, Salmonella typhimurium
  CDS (1)..(1617): transl_table=11
atgcgcgttaacaatttaaccccgcaagatctcaaggcttatggtatcaacgacgtccaggatatcgtttacaatcccagctacgacaccctttatcaggaagaacttaatcctggtctggaaggctatgagcgtggcgtgttaactaacctgggcgctgttgccgttgataccggtatttttaccggtcgttcgcctaaggataagtatattgttcgcgacgacaccacgcgtgatacgctgtggtggtccgataagggtaaaggtaaaaacgataataagccgctttcccaggaaacctggcaacacctgaaaggtctggtgacgcatcagctttctggtaaacgcttattcattgttgatgcgttctgcggcgcaaatgccgatacgcgtctttccgtgcgctttattacggaagtcgcctggcaggcccacttcgttaaaaatatgttcattcgcccaacggacgaagagctggtaggcttcaaacctgactttattgtcatgaacggcgcgaagtgcaccaacccgcagtggaaagagcaagggctgaactcggaaaacttcgtggcgttcaacctgactgaacgtattcagcttattggcggcacctggtacggcggcgaaatgaaaaaagggatgttctcggtaatgaactacctgctgccgctcaaaggtatcgcctcaatgcactgttccgccaacgtgggtgaaaaaggcgatgtcgcggtcttcttcggcctttccggtaccggaaaaaccactctctccaccgacccgaaacgtcgtctgattggcgatgatgagcacggttgggatgacgacggcgtgttcaattttgaaggcggctgctacgccaaaaccatcaaactgtcgaaagaagcggagccagaaatttatcatgcgattcgccgtgatgcgctgctggaaaacgtcaccgtgcgcgaagacggcaccgttgatttcgacgatggttccaaaaccgaaaacacccgcgtctcttacccgatctatcatatcgataacatcgttaagcccgtgtccaaagcaggtcacgccaccaaggttatcttcctgacggcggacttcggcgtgttgccgccggtttcccgtttaaccgctaaccagacgcagtaccacttcctgtcaggtttcaccgctaaactggccggcaccgaacgcggcgtcaccgaaccgacccccaccttctccgcctgcttcggcgccgcgttcctgacgctgcacccaacgcagtatgctgaggtgctggtgaaacgtatgcaggcagcaggcgcgcaggcttatctggttaacaccggctggaatggcaccggcaaacgtatctccatcaaagatacgcgcgcaattatcgacgccattctgaacggttctcttgataacgcggaaaccttccgtctgccgctgttcgatctggcgatcccgactgaactgccaggcgtggatacccacattctcgacccgcgtaacacctacgcgtcgccggaacaatggcaggaaaaagccaccgcgctggcgaaactgttcattgagaacttcgagaagtatacggataccccggcaggcgaagcgctggttagcgccggaccgaagctgtaa

SEQ ID NO: 1304 - protein, 538 aa, Salmonella typhimurium
MRVNNLTPQDLKAYGINDVQDIVYNPSYDTLYQEELNPGLEGYERGVLTNLGAVAVDTGIFTGRSPKDKYIVRDDTTRDTLWWSDKGKGKNDNKPLSQETWQHLKGLVTHQLSGKRLFIVDAFCGANADTRLSVRFITEVAWQAHFVKNMFIRPTDEELVGFKPDFIVMNGAKCTNPQWKEQGLNSENFVAFNLTERIQLIGGTWYGGEMKKGMFSVMNYLLPLKGIASMHCSANVGEKGDVAVFFGLSGTGKTTLSTDPKRRLIGDDEHGWDDDGVFNFEGGCYAKTIKLSKEAEPEIYHAIRRDALLENVTVREDGTVDFDDGSKTENTRVSYPIYHIDNIVKPVSKAGHATKVIFLTADFGVLPPVSRLTANQTQYHFLSGFTAKLAGTERGVTEPTPTFSACFGAAFLTLHPTQYAEVLVKRMQAAGAQAYLVNTGWNGTGKRISIKDTRAIIDAILNGSLDNAETFRLPLFDLAIPTELPGVDTHILDPRNTYASPEQWQEKATALAKLFIENFEKYTDTPAGEALVSAGPKL

SEQ ID NO: 1305 - DNA, 1620 bp, Selenomonas ruminantium
  CDS (1)..(1620): transl_table=11
atggcaaacatcgatcttagccaatatggcatcactggtactaccggaattctccacaatccgtcttacaagacgctttttgaagaagagactaaagaaggtttaacaggctacgaacagggtcaggtttccgaactgggcgctgttaacgtaaagactggtattttcaccggccgttctcctaaagataaattcatcgtggatgatgaaacttcccatgacactgtatggtgggattccgaagattatcacaacgataaccacagagctacgccggaaacctggaacgctctgaaagaaatcgctaaaaaggaactgtccaacaagaaactctacgttgtagatgctttctgcggtgccaacaaagacacccgcatggctgtccgcttcatcgtagaagttgcttggcaggcacatttcgtaacgaatatgttcatccagccgacggaagaagagctggctaacttcaagccggacttcgtagtttacaacgcttccaaggctaaagttgaaaactacaaggaacttggtctccattccgaaacggcagtagtatttaacctcacgagccgcgaacaggttatcatcaacacctggtacggcggtgaaatgaagaagggtatgttttccatgatgaactacttcctgccgctcaaggggattgctgctatgcattgctccgctaatacggacaagcagggccagaacacggctatcttcttcggcctctccggcacgggtaaaaccaccctgtccacggacccgaaacgtctcctgattggtgatgatgaacacggctgggatgatgaaggcgtattcaacttcgaaggcggctgctatgctaaggttatcaacctcgacatggaatccgaaccggacatctatggcgccatcaaacgtaacgctctgctcgaaaacgttaccctcgacgacaagggcaacatcgactttgccgataagaccatcacggaaaacacccgtgtatcctatcctatcgaccacatcaaaggcaccgttaagggctttgttaacgacaagagcgcagctccggcagctaagagtgttatcttcctgtccgctgatgctttcggcgtactgcccccggtttccatcctgactccggaacagacgaagtattacttcctctccggcttcacggctaaactggctggtacggaacgcggcatcaccgaaccgacaccgaccttctccgcttgcttcggtcaggcattcctcgaactgcatccgaccaagtacgcagaagaactcgttaagaagatggaggctaacggcacgaaggcatacctcgtgaacacgggctggaatggttccggcaagcgtatctccatcaaagatacccgtggcatcatcgatgctatccatagcggcgctatcaaaaaagctccgaccaagaagattccgttcttcaacctcgaagtaccgacggaacttgagggcgttgacaccaacatcctcgacccgaaggatacctatgctaacccggctgattgggaagcaaaagcaaaagacctcgctcagcgcttcatcaagaacttcgacaaatacacgaagaacaatgaagctggtaaggctctcgttgccgctggtccgcagctctaa

SEQ ID NO: 1306 - protein, 539 aa, Selenomonas ruminantium
MANIDLSQYGITGTTGILHNPSYKTLFEEETKEGLTGYEQGQVSELGAVNVKTGIFTGRSPKDKFIVDDETSHDTVWWDSEDYHNDNHRATPETWNALKEIAKKELSNKKLYVVDAFCGANKDTRMAVRFIVEVAWQAHFVTNMFIQPTEEELANFKPDFVVYNASKAKVENYKELGLHSETAVVFNLTSREQVIINTWYGGEMKKGMFSMMNYFLPLKGIAAMHCSANTDKQGQNTAIFFGLSGTGKTTLSTDPKRLLIGDDEHGWDDEGVFNFEGGCYAKVINLDMESEPDIYGAIKRNALLENVTLDDKGNIDFADKTITENTRVSYPIDHIKGTVKGFVNDKSAAPAAKSVIFLSADAFGVLPPVSILTPEQTKYYFLSGFTAKLAGTERGITEPTPTFSACFGQAFLELHPTKYAEELVKKMEANGTKAYLVNTGWNGSGKRISIKDTRGIIDAIHSGAIKKAPTKKIPFFNLEVPTELEGVDTNILDPKDTYANPADWEAKAKDLAQRFIKNFDKYTKNNEAGKALVAAGPQL

SEQ ID NO: 1307 - DNA, 1542 bp, Shewanella oneidensis
  CDS (1)..(1542): transl_table=11
atggcggatggattaaaccgcgttcattacaacccctctacagcacaactggtcgaatttgccctgctacgcggcgaaggtgaattgacggctaacggcgcactggttgctaaaacgggtacacgtacaggtcgctctcctggcgatcgttttattgttaaagaacccggttcagcggcagatattgaatggggaccagttaaccaagcatttgaacccggcgcgtttgaaggtttatgggcacgtgtagaagcattcctcgccgataaagagctgtttgtatctgacctcgaagtcggtgcagacccagaacattaccagccagtgcgcgtgacgactcaatacgcttggcaccaactgttcgcccgcaacctttttatcatcccagaagaatttaatcgtcaaaacaaacctgtatggcaaatcatcaacgcgccggacttcgtctgtatgcctgagcgtgatggcaccaattcagatgcggcggtgatcttaaactttgctgaacgcaaagtgttgttagcgggcctgaaatacgctggcgaaatgaaaaagtcgatgttctcggtgcaaaacttcctattgccagcacaaggtgtattaccaatgcactgctcggctaacgtaggtaaagacggcgacaccaccctattcttcggtctgtcaggtacaggaaaaaccaccctgtctgccgatccaaaacgcttcctgatcggtgacgatgagcacgggtgggcaccgggcggcgtattcaatatcgaaggcggttgctacgctaaatgtatcgatttaagccaaaagaacgagcctgtgatttgggatgcgattcgctttggtactgtgcttgaaaacgtggtaatggacgagcaccgcgtgcccaactacaaagacagcagcctgacggaaaacacccgtgcagcttacccactggagcatattgctcagcgtaaagaagataatcgcggcgccgagccacatgctgtggtgttcttaacctgcgacgtgtctggtgtgttgcctccggtgtctatcctgagcaaggagcaagcggcttaccacttcctctctggttacaccgcgaaagtgggttcaactgaaatcggttcaacttctgcaattcagtcaaccttctcaacttgcttcggcgcacctttcttcccacgtccagcaggtgtatatgctgagctgctgatgaagcgtatcgagtcattcggtagccaagtgtacttagtcaacactggctggactggcggtccacacggtattggtaaacgtttcgacatcccaactacccgcgctatcatcgatgcgatcgtcagcggcgagctgaaaaacgttgaaaccgtgcatttagataccttaaacctcgcggtgcctgtggcggttagcggtgtcgacagtaacttactcaatccagtaaacacgtggagcgataaagcactgtacgctgaatacgcgcaaaaactggccgcagctttcactaaaaactttgctaagtatcaagtgtcagacgcgattcgcaacgctggcccaaaggcttaa

SEQ ID NO: 1308 - protein, 513 aa, Shewanella oneidensis
MADGLNRVHYNPSTAQLVEFALLRGEGELTANGALVAKTGTRTGRSPGDRFIVKEPGSAADIEWGPVNQAFEPGAFEGLWARVEAFLADKELFVSDLEVGADPEHYQPVRVTTQYAWHQLFARNLFIIPEEFNRQNKPVWQIINAPDFVCMPERDGTNSDAAVILNFAERKVLLAGLKYAGEMKKSMFSVQNFLLPAQGVLPMHCSANVGKDGDTTLFFGLSGTGKTTLSADPKRFLIGDDEHGWAPGGVFNIEGGCYAKCIDLSQKNEPVIWDAIRFGTVLENVVMDEHRVPNYKDSSLTENTRAAYPLEHIAQRKEDNRGAEPHAVVFLTCDVSGVLPPVSILSKEQAAYHFLSGYTAKVGSTEIGSTSAIQSTFSTCFGAPFFPRPAGVYAELLMKRIESFGSQVYLVNTGWTGGPHGIGKRFDIPTTRAIIDAIVSGELKNVETVHLDTLNLAVPVAVSGVDSNLLNPVNTWSDKALYAEYAQKLAAAFTKNFAKYQVSDAIRNAGPKA

SEQ ID NO: 1309 - DNA, 1623 bp, Shigella flexneri
  CDS (1)..(1623): transl_table=11
atgcgcgttaacaatggtttgcccccgcaagaactcgaggcttatggtatcagtaacgtacatgatatcgtttacaacccaagctacgacctgctgtatcaggaagagctcgatccgagcctgacaggttatgagcgcggggtgttaactaatctgggtgccgttgccgtcgataccgggatcttcaccggtcgttcaccaaaagataagtatatcgtccgtgacgataccactcgcgatactttctggtgggcagacaaaggcaaaggtaagaacgacaacaaacctctctctccggaaacctggcagcatctgaaaggcctggtgaccaggcagctttccggcaaacgtctgttcgttgtcgacgctttctgtggtgcgaacccggatactcgtctttccgtccgtttcatcaccgaagtggcctggcaggcgcattttgtcaaaaacatgtttattcgcccgagcgatgaagagctggcaggtttcaaaccagactttatcgttatgaacggcgcgaagtgcactaacccgcagtggaaagaacagggtctgaactccgaaaacttcgtggcgtttaacctgaccgagcgcatgcagctgattggcggcacctggtacggcggcgaaatgaagaaagggatgttctcgatgatgaactacctgctgccgctgaaaggtatcgcttctatgcactgctccgccaacgttggcgagaaaggcgatgttgcggtgttcttcggcctttccggcaccggtaaaaccaccctttccaccgacccgaaacgccgcctgattggcgatgacgaacacggctgggacgatgacggcgtgtttaatttcgaaggcggctgctacgcaaaaactatcaagctgtcgaaagaagcggaacctgaaatctacaacgctatccgtcgtgatgcgctgctggaaaacgtcaccgtgcgtgaagatggcactatcgactttgatgatggttcaaaaaccgagaacacccgcgtttcttatccaatctatcacatcgataacatcgttaagccggtttccaaagcgggccacgcgactaaggttatcttcctgactgctgatgctttcggcgtgttgccgccggtttctcgcctgactgccgatcaaacccagtatcacttcctctctggcttcaccgccaaactggccggtactgagcgtggcatcaccgaaccgacgccaaccttctccgcttgcttcggcgcggcgttcctgtcgctgcacccgactcagtacgcagaagtgctggtgaaacgtatgcaggcggcgggcgcgcaggcttatctggttaacactggctggaacggcactggcaaacgtatctcgattaaagatacccgcgccattatcgacgccatcctcaacggttcgctggataatgcagaaaccttcactctgccgatgtttaacctggcgatcccaaccgaactgccgggcgtagacacgaagattctcgatccgcgtaacacctacgcttctccggaacagtggcaggaaaaagccgaaaccctggcgaaactgtttatcgacaacttcgataaatacaccgacacccctgcgggtgccgcgctggtagcggctggtccgaaactgtaa

SEQ ID NO: 1310 - protein, 540 aa, Shigella flexneri
MRVNNGLPPQELEAYGISNVHDIVYNPSYDLLYQEELDPSLTGYERGVLTNLGAVAVDTGIFTGRSPKDKYIVRDDTTRDTFWWADKGKGKNDNKPLSPETWQHLKGLVTRQLSGKRLFVVDAFCGANPDTRLSVRFITEVAWQAHFVKNMFIRPSDEELAGFKPDFIVMNGAKCTNPQWKEQGLNSENFVAFNLTERMQLIGGTWYGGEMKKGMFSMMNYLLPLKGIASMHCSANVGEKGDVAVFFGLSGTGKTTLSTDPKRRLIGDDEHGWDDDGVFNFEGGCYAKTIKLSKEAEPEIYNAIRRDALLENVTVREDGTIDFDDGSKTENTRVSYPIYHIDNIVKPVSKAGHATKVIFLTADAFGVLPPVSRLTADQTQYHFLSGFTAKLAGTERGITEPTPTFSACFGAAFLSLHPTQYAEVLVKRMQAAGAQAYLVNTGWNGTGKRISIKDTRAIIDAILNGSLDNAETFTLPMFNLAIPTELPGVDTKILDPRNTYASPEQWQEKAETLAKLFIDNFDKYTDTPAGAALVAAGPKL

SEQ ID NO: 1311 - DNA, 1599 bp, Silicibacter pomeroyi
  CDS (1)..(1599): transl_table=11
atgacatctggacgggttaacccgcaattccgcctcgaggatcagggcatcgagggtctgggcaatgtctattacaacttcatggaaccggcgctgatcgaagcggcgttgaagcggggcgagggaacgctgggcaatggcggggctttccttgtcaccaccggcaagttcaccggccgctcgcccaaggacaagcatgtggtcaagaccgccagcgttgccgacagcatctggtgggacaacaacgccgcaatgacccccgaagggttcgacgcgctttatgacgacatgctggcccatatgaagggcaaggactatttcgtgcaggatctggtcggcggcgccgacccggcctattcgatcaacgtgcgcatggtcaccgaactggcctggcacaacctgttcatccgtcacctgctgcgccgtcccgcgcgcgaggatctgaacgagttcgtggccgatttcaccgtcatcaactgccccagcttccaggccgacccggccaagcacggctgccgcagcgagaccgtgatcgcgatgaatttcgaccgcaagctgatcctgatcggcggcaccgagtatgcgggcgagaacaagaagtcggtgttcaccctgctgaactacatgctgccggaaaaaggcgtgatgccgatgcactgctcggccaaccacgcggtcggcaacccggtcgacaccgccgtgttctttggccttagcggcaccggcaagaccacgctgtcggccgacccggcgcgcgtgctgatcggcgatgacgaacatggctggtcggatcgcggcaccttcaacttcgaaggcggctgctatgccaagaccatcaacctcaaccccgaggccgagccggaaatctacgccaccaccaccaagttcgcgaccgtgatcgagaacatggtgtttgacgaagagaccaaggaactggatttcgacgatgacagcctgacggccaacatgcgttgcgcctatccgctggaatacatctcgaacgcctccgtctcggcactgggcgggcatcccaagaacatcatcatgctgacctgtgatgcctttggcgtgctgccgccgatcgcgcggctgaccccggcgcaggcgatgtatcacttcctgtcgggcttcacctcgaaggtggcgggaaccgagcgcggcgtgaccgagccgcagccgaccttttcgacctgcttcggcgcccccttcatgccgcgccgtcccgaggtctatggcaacctgctgcgtgacaagatcgcccgtcacggcgcgacctgctggctggtcaataccggctggaccggcggcgcctacggcgttggcagccggatgccgatcaaggccacccgcgccctgctgaccgccgcgctgaacggctcgctcaacaatgccgagttccgcaaggacggcaatttcggctttgacgtgccggtgtcggtgccgggcgtggccgaggttctgctggacccgcgccgcacctgggacgaccagggcgcctttgacaagcaggcggccaagctggtgcagatgttcgccgacaatttcgaacaatatgtcccctatatcgacgaggacgtgaaggccgtcgccatcggctga

SEQ ID NO: 1312 - protein, 532 aa, Silicibacter pomeroyi
MTSGRVNPQFRLEDQGIEGLGNVYYNFMEPALIEAALKRGEGTLGNGGAFLVTTGKFTGRSPKDKHVVKTASVADSIWWDNNAAMTPEGFDALYDDMLAHMKGKDYFVQDLVGGADPAYSINVRMVTELAWHNLFIRHLLRRPAREDLNEFVADFTVINCPSFQADPAKHGCRSETVIAMNFDRKLILIGGTEYAGENKKSVFTLLNYMLPEKGVMPMHCSANHAVGNPVDTAVFFGLSGTGKTTLSADPARVLIGDDEHGWSDRGTFNFEGGCYAKTINLNPEAEPEIYATTTKFATVIENMVFDEETKELDFDDDSLTANMRCAYPLEYISNASVSALGGHPKNIIMLTCDAFGVLPPIARLTPAQAMYHFLSGFTSKVAGTERGVTEPQPTFSTCFGAPFMPRRPEVYGNLLRDKIARHGATCWLVNTGWTGGAYGVGSRMPIKATRALLTAALNGSLNNAEFRKDGNFGFDVPVSVPGVAEVLLDPRRTWDDQGAFDKQAAKLVQMFADNFEQYVPYIDEDVKAVAIG

SEQ ID NO: 1313 - DNA, 1593 bp, Staphylococcus aureus
  CDS (1)..(1593): transl_table=11
atgtcagtagacacatacactgaaacaactaaaattgacaaattactgaaaaaaccaacgtcacattttcaactttcgacgacacaactttataataaaatcttagacaataacgaaggggtattaacagaacttggtgctgttaatgcaagtactggaaaatatactggtcgttcgcctaaagacaaattttttgtctcagaaccttcatatagagataacattgactggggagaaattaatcaacctatcgatgaagaaactttcttgaagttataccataaagtactagactatttagataaaaaagatgaattatacgtatttaaaggctacgctggtagcgataaagatacaatgttaaaacttacagtcatcaatgaattagcatggcataatttatttgctaaaaatatgtttattagacctgaatcaaaagaagaagctacaaagattaaacctaacttcactatcgtttctgccccacattttaaagcagatccagaagttgatggtactaaatctgaaacctttgtcattatttcatttaaacacaaagtcattttaatcggcggtactgaatacgctggtgaaatgaaaaaaggtatcttctctgtaatgaattatctcttaccgatgcaagatattatgagcatgcattgctcagcaaacgttggtgaaaaaggcgatgttgcattattctttggtctatctggcacaggtaaaacaaccttatcggctgacccacaccgtaaactaatcggtgatgatgaacacggctggaataaaaacggggtctttaatatcgaaggtggctgctatgcaaaagcaattaatctttccaaagaaaaagaaccacagatttttgacgcaatcaaatatggtgcaattttagagaacactgtagttgcagaagatggttcagtggactttgaagacaatcgttatacagaaaacacgcgtgccgcttatccaattaatcacattgacaatattgtagtaccatctaaagcagcacatccaaatacaattattttcttaactgcggatgcatttggtgttattccaccgatttcaaagttaaataaagaccaagcaatgtatcatttcttgagtggtttcacttctaaattagctggcacagagcgtggtgtgacagaacctgaaccatcattctcaacatgtttcggcgcaccgttcttcccgttacaccctactgtttacgctgatttattaggtgaacttatcgatttacatgatgttgatgtttatcttgttaatactggatggactggcggaaaatatggtgtaggacgtagaatcagcttacattacacacgtcaaatggtaaaccaagcgatttctggcaaattgaaaaatgcagaatatacaaaggatagtacgtttggtttaagcattcctgtagaaattgaagatgtaccgaaaactattttaaatccaattaatgcttggagcgacaaagagaaatataaaacacaagcagaagatttaattcaacgttttgaaaagaacttcgaaaaatttggtgaaaaagttgaacatattgccgaaaaaggtagcttcaacaaataa

SEQ ID NO: 1314 - protein, 530 aa, Staphylococcus aureus
MSVDTYTETTKIDKLLKKPTSHFQLSTTQLYNKILDNNEGVLTELGAVNASTGKYTGRSPKDKFFVSEPSYRDNIDWGEINQPIDEETFLKLYHKVLDYLDKKDELYVFKGYAGSDKDTMLKLTVINELAWHNLFAKNMFIRPESKEEATKIKPNFTIVSAPHFKADPEVDGTKSETFVIISFKHKVILIGGTEYAGEMKKGIFSVMNYLLPMQDIMSMHCSANVGEKGDVALFFGLSGTGKTTLSADPHRKLIGDDEHGWNKNGVFNIEGGCYAKAINLSKEKEPQIFDAIKYGAILENTVVAEDGSVDFEDNRYTENTRAAYPINHIDNIVVPSKAAHPNTIIFLTADAFGVIPPISKLNKDQAMYHFLSGFTSKLAGTERGVTEPEPSFSTCFGAPFFPLHPTVYADLLGELIDLHDVDVYLVNTGWTGGKYGVGRRISLHYTRQMVNQAISGKLKNAEYTKDSTFGLSIPVEIEDVPKTILNPINAWSDKEKYKTQAEDLIQRFEKNFEKFGEKVEHIAEKGSFNK

SEQ ID NO: 1315 - DNA, 1593 bp, Staphylococcus aureus
  CDS (1)..(1593): transl_table=11
atgtcagtagacacatacactgaaacaactaaaattgacaaattactgaaaaaaccaacgtcacattttcaactttcgacgacacaactttataataaaatcttagacaataacgaaggggtattaacagaacttggtgctgttaatgcaagtactggaaaatatactggtcgttcgcctaaagacaaattttttgtctctgaaccttcatatagagataacattgattggggagaaattaatcaacctatcgatgaagaaactttcttgaagttataccataaagtactagactatttagataaaaaagatgaactatacgtatttaaaggctacgctggtagcgataaagatacaatgttaaaacttacagtcatcaatgaattagcatggcataatttatttgctaaaaatatgtttattagacctgaatcaaaagaagaagctacaaagattaaacctaacttcactatcgtttctgccccacattttaaagcagatccagaagttgatggtactaaatctgaaacctttgtcattatttcatttaaacacaaagtcattttaatcggcggtactgaatacgctggtgaaatgaaaaaaggtatcttctctgtaatgaattatctcttaccgatgcaagatattatgagcatgcattgctcagcaaacgttggtgaaaaaggcgatgttgcattattctttggtctatctggcactggtaaaacaaccttatcggctgatccacaccgaaaactaatcggtgatgatgaacacggctggaataaaaacggggtctttaatatcgaaggtggctgctatgcaaaagcaattaatctttccaaagaaaaagaaccacagatttttgacgcaatcaaatatggtgcgattttagagaacactgtagttgcagaagatggttcagtggactttgaagacaatcgttatacagaaaacactcgtgccgcttatccaattaatcacattgacaatattgtagtaccatcaaaagcagcacatccaaatacaattattttcttaactgcggatgcatttggtgttattccaccgatttcaaagttaaataaagaccaagcaatgtatcatttcttgagtggtttcacttctaaattagctggtacagagcgtggtgtgacagaacctgaaccatcattctcaacatgtttcggagcaccgttcttcccgttacaccctactgtttacgctgatttattaggtgaacttatcgatttacatgatgttgatgtttatcttgttaatactggatggactggcggaaaatatggtgtaggacgtagaatcagcttacattacacacgtcaaatggtaaaccaagcgatttctggcaaattgaaaaatgcagaatatacaaaagatagtacgtttggtttaagcattcctgtaaaaattgaagatgtaccgaaaacaattttaaatccaattaatgcttggagcgacaaagagaaatataaagcacaagcagaagatttaattcaacgttttgaaaagaacttcgaaaaatttggtgaaaaagttgaacatattgctgaaaaaggtagcttcaacaaataa

SEQ ID NO: 1316 - protein, 530 aa, Staphylococcus aureus
MSVDTYTETTKIDKLLKKPTSHFQLSTTQLYNKILDNNEGVLTELGAVNASTGKYTGRSPKDKFFVSEPSYRDNIDWGEINQPIDEETFLKLYHKVLDYLDKKDELYVFKGYAGSDKDTMLKLTVINELAWHNLFAKNMFIRPESKEEATKIKPNFTIVSAPHFKADPEVDGTKSETFVIISFKHKVILIGGTEYAGEMKKGIFSVMNYLLPMQDIMSMHCSANVGEKGDVALFFGLSGTGKTTLSADPHRKLIGDDEHGWNKNGVFNIEGGCYAKAINLSKEKEPQIFDAIKYGAILENTVVAEDGSVDFEDNRYTENTRAAYPINHIDNIVVPSKAAHPNTIIFLTADAFGVIPPISKLNKDQAMYHFLSGFTSKLAGTERGVTEPEPSFSTCFGAPFFPLHPTVYADLLGELIDLHDVDVYLVNTGWTGGKYGVGRRISLHYTRQMVNQAISGKLKNAEYTKDSTFGLSIPVKIEDVPKTILNPINAWSDKEKYKAQAEDLIQRFEKNFEKFGEKVEHIAEKGSFNK

SEQ ID NO: 1317 - DNA, 2862 bp, Staphylococcus epidermidis
  CDS (297)..(1889): transl_table=11
tatagatagagagaaggctcttaaacgtccattcgctcttatcgttcagaccatatttgtctgcaaacggtttggcacctttctttaaataaagaggttgctgggtttcattgggtccatgtccctccaccactcaggataagagaatccgttaaacttaataatatctaattcaaagtatgttgtcaattttatacattgtcactatttctattttaaagtggataaattcaatctgtatgttatactatctaaatgtaagggcttacataaattatcgtatggagggattgggtatgtctatagatacatacacagaaacacttaagataaataagctaatagaaaaagctacatcacattttcaactatcatcaacacaattatacaaaaaaattttaaaaaatcatgagggtgagttaactgaactgggggcaataaatgttaaaacaggtaagtacactggtcgttcacctaaagataaatttatagtcactgaaccatcgtataaggataatataaattggggagatatcaatcagcccatggatgaagaaacatttctaaaactttacaataaagtactcgattatttaaatcagaaagaggaactttacatatttagtggatatgcagggagcgataaagagtcacgtcttaaacttaaggtgataaatgaattagcttggcataatttatttgctcgtaacatgtttattcgtccagaatctatagatgaagctcaaaatataaaacccaacttcacaattgtttcagcacctcactttaaagctaatcccaaattagatgggacacatagtgaaacatttgtcattatatcttttaaacataaagtgattttaattggtggcacagaatatgctggtgaaatgaaaaaaggtattttctctgtaatgaactatttgcttccaatacaggatatcatgagtatgcattgttcagctaatgttggagaaaaaggagatgtagcactattctttggattatcaggaactggtaagacgacgctttctgccgatccaaaacgtaagttaattggtgacgatgaacatggttggaataaaaatggcgtttttaatattgagggtgggtgttatgcaaaagcaattcatttatctaaacagaaagagcctcaaatttataatgctattaaatacggaacaatattagaaaacacagttacaaatgatgacggtacggtagattttgatgataacacctatactgaaaacactcgcgccgcctaccctattgactatatagagaatattgttacaccttcaaaggcagcacatccgaatacgattatattcttaaccgctgatgcatttggagttatccctcctatttctaagctaactaaagatcaagcaatgtatcatttcttaagtggattcacgtctaaactagctggaacagaacgtggtgttactgaacctcaaccttcgttttcaacttgctttggtgcaccattcttacctttgagtccaacaaagtacgctgatctacttggaaatttaatcgatattcatgatgtagatgtatatctagtaaatactggatggacaggtggtaaatatggtgtagggcgaagaattagtctacactatactcgtgaaatggtagatcaagcaatatcaggtaaattaaaaaatactaaatatattaaagatgatacatttggcttaaatattccagttcaaattgacagtgtacctacaactattctgaatcctatcaatgcttggaacaataaagataactacaaagcacaagcttacgatttgattcaacgctttaataataattttaaaaaattcggcaaggaagtcgaacatattgccaacaaaggtgcatttaatcaataattaatataagcatttattacgctaaatttaaaagcattgtgcctgagaaagcttttaatatctcgggcacttaaatttttatttaaatgacgatggaaataataatacatttatttgaggatatctagatatgatattacatttctagagtttcaaacagtctctttatttaataactaattattcctaatatctacattgctatcatcaacttgtataatccattgttactatatatttaaatttttattttcgacgtcgttcatccattgatgtatatatcgaattacgtctctcatcgcaggaggtcgtggtacatgaccttcatccaattgataataggtttgataataaattcctttggattttaattttttttctaaatcataagcttgatgtattccaacttgaatatctttgccaccatgaataatgagaataggaggactatctttttttataaattgcattgcatctctgcttttataagctttcgcatctttttttggatgtccaaccattcgtcgtagcatacctctcaagtcaactcgttcttcatacattaaatgtatatcagatacgccaccccaaatcatataactatctacaggcaaatcattaaaagtaagtaatccttgtagacctccacgtgaaaatcctaccatatgtataaatgcagaaggatagttttgatttaaaagtcgaatcaaatgcgttacatcatttaaatcaccgcggtaaaattcatctcttccttcacttccattatttcctctatagtaaggacctataactaaagtatattcatttgcaaattgcataagtcttgcagctctctcccttagcttttctttttataattcattcaatttattttatttcatatcatgaacagctttttcatattgtctaacgatatcaaagtctgaatctttagtatcaacataaccttcatgagaatatacctcgctaa

SEQ ID NO: 1318 - protein, 530 aa, Staphylococcus epidermidis
MSIDTYTETLKINKLIEKATSHFQLSSTQLYKKILKNHEGELTELGAINVKTGKYTGRSPKDKFIVTEPSYKDNINWGDINQPMDEETFLKLYNKVLDYLNQKEELYIFSGYAGSDKESRLKLKVINELAWHNLFARNMFIRPESIDEAQNIKPNFTIVSAPHFKANPKLDGTHSETFVIISFKHKVILIGGTEYAGEMKKGIFSVMNYLLPIQDIMSMHCSANVGEKGDVALFFGLSGTGKTTLSADPKRKLIGDDEHGWNKNGVFNIEGGCYAKAIHLSKQKEPQIYNAIKYGTILENTVTNDDGTVDFDDNTYTENTRAAYPIDYIENIVTPSKAAHPNTIIFLTADAFGVIPPISKLTKDQAMYHFLSGFTSKLAGTERGVTEPQPSFSTCFGAPFLPLSPTKYADLLGNLIDIHDVDVYLVNTGWTGGKYGVGRRISLHYTREMVDQAISGKLKNTKYIKDDTFGLNIPVQIDSVPTTILNPINAWNNKDNYKAQAYDLIQRFNNNFKKFGKEVEHIANKGAFNQ

SEQ ID NO: 1319 - DNA, 1593 bp, Staphylococcus epidermidis
  CDS (1)..(1593): transl_table=11
atgtctatagatacatacacagaaacacttaagataaatcagctaatagaaaaagctacatcacattttcaactatcatcaacacaattatacaaaaaaattttaaaaaatcatgagggtgagttaactgaactgggggcaataaatgttaaaacaggtaagtacactggtcgttcacctaaagataaatttatagtcactgaaccatcgtataaggataatataaattggggagatatcaatcagcccatggatgaagaaacatttctaaaactttacaataaagtactcgattatttaaatcagaaagaggaactttacatatttagtggatatgcagggagcgataaagagtcacgtcttaaacttaaggtgataaatgaattagcttggcataatttatttgctcgtaacatgtttattcgtccagaatctatagatgaagctcaaaatataaaacccaacttcacaattgtttcagcacctcactttaaagctaatcccaaattagatgggacacatagtgaaacatttgtcattatatcttttaaacataaagtgattttaattggtggcacagaatatgctggtgaaatgaaaaaaggtattttctctgtaatgaactatttgcttccaatgcaggatataatgagtatgcattgttcagctaatgttggagaaaaaggagatgtagcactattctttggattatcaggaactggtaagacgacgctttctgccgatccaaaacgtaagttaattggtgacgatgaacatggttggaataaaaatggcgtttttaatattgagggtgggtgttatgcaaaagcaattcatttatctaaacagaaagagcctcaaatttataatgctattaaatacggaacaatattagaaaacacagttacaaatgatgacggtacgatagattttgatgataacacctatactgaaaacactcgcgccgcctaccctattgactatatagagaatattgttacaccttcaaaggcagcacatccgaatacgattatattcttaaccgctgatgcatttggagttatccctcctatttctaagctaactaaagatcaagcaatgtatcatttcttaagtggattcacgtctaaactagctggaacagaacgtggtgttactgaacctcaaccttcgttttcaacttgctttggtgcaccattcttacctttgagtccaacaaagtacgctgatctacttggaaatttaatcgatattcatgatgtagatgtatatctagtaaatactggatggacaggtggtaaatatggtatagggcgaagaattagtctacactatactcgtgaaatggtagatcaagcaatatcaggtaaattaaaaaatactaaatatattaaagatgatacatttggcttaaatattccagttcagattgacagtgtacctacaactattctaaatcctatcaatgcttggaacaataaagataactacaaagcacaagcttacgatttgattcaacgctttaataataattttaaaaaattcggcaaggaagtcgaacatattgccaacaaaggtgcatttaatcaataa

SEQ ID NO: 1320 - protein, 530 aa, Staphylococcus epidermidis
MSIDTYTETLKINQLIEKATSHFQLSSTQLYKKILKNHEGELTELGAINVKTGKYTGRSPKDKFIVTEPSYKDNINWGDINQPMDEETFLKLYNKVLDYLNQKEELYIFSGYAGSDKESRLKLKVINELAWHNLFARNMFIRPESIDEAQNIKPNFTIVSAPHFKANPKLDGTHSETFVIISFKHKVILIGGTEYAGEMKKGIFSVMNYLLPMQDIMSMHCSANVGEKGDVALFFGLSGTGKTTLSADPKRKLIGDDEHGWNKNGVFNIEGGCYAKAIHLSKQKEPQIYNAIKYGTILENTVTNDDGTIDFDDNTYTENTRAAYPIDYIENIVTPSKAAHPNTIIFLTADAFGVIPPISKLTKDQAMYHFLSGFTSKLAGTERGVTEPQPSFSTCFGAPFLPLSPTKYADLLGNLIDIHDVDVYLVNTGWTGGKYGIGRRISLHYTREMVDQAISGKLKNTKYIKDDTFGLNIPVQIDSVPTTILNPINAWNNKDNYKAQAYDLIQRFNNNFKKFGKEVEHIANKGAFNQ

SEQ ID NO: 1321 - DNA, 1590 bp, Thermus thermophilus
  CDS (1)..(1590): transl_table=11
atgcaacgtttggaagccctcggtattcaccccaagaagcgggtcttctggaacaccgtctcccccgtcctcgtggaacacaccctcctccggggagaaggccttctcgcccaccacggccccctggtggtggacaccaccccctacacggggagaagccccaaggacaagttcgtggtgcgggagccggaggtggaaggggagatctggtggggagaggtgaaccaacccttcgccccggaggcctttgaagccctctaccagagggtggtccagtacctctccgagcgggacctctacgtccaggacctctacgccggggcggaccggcgctaccggctcgccgtgcgggtggtgacggaaagcccctggcacgccctcttcgcccgcaacatgttcatcctcccccgccgcttcggcaacgacgacgaggtggaggccttcgtccccggcttcaccgtggtccacgccccctacttccaggcggaccccgagcgggacgggacgaggagcgaggtcttcgtggggatcagcttccagaggaggctcgtcctcatcgtgggcaccaagtacgccggggagatcaagaagagcatcttcaccgtcatgaactacctcatgcccaagcggggggtcttccccatgcacgcctcggccaacgtggggaaggaaggggacgtggcggtcttcttcggcctctccggcaccggcaagaccaccctctccaccgacccggaccgccccctcatcggcgacgacgagcacggctggagcgaggatggggtcttcaactttgagggcgggtgctacgccaaggtgatccgcctctccccggagcacgagcccctgatctacaaggcctccaaccagtttgaggccatcctggagaacgtggtggtcaacccggaaagccgccgggtccagtgggacgacgactccaagacggagaacacccgctcctcctaccccatcgcccacctgaagaacgtggtggagtcgggcgtggcgggccaccccagggccatcttcttcctctccgccgacgcctacggggtccttccccccatcgcccggctttccccggaggaggccatgtactacttcctctccggctacaccgcccgggtggcggggacggagcggggcgtgaccgagcccagggccaccttctccgcctgcttcggcgcccccttcctccccatgcaccccggggtgtacgcgaggatgctgggggagaagatcaggaagcacgcgccccgggtctacctggtgaacacgggctggaccggcggaccctacggggtggggtaccgcttccccctccccgtgacccgggcccttctgaaggccgccctctccggggccttggagaacgtcccctaccgcagggaccccgtcttcgggtttgaggtgcccctcgaggcccccggcgtgccccaggagctcttaaacccccgggagacctgggcggacaaggaggcctacgaccagcaggcgcggaagctcgcccgcctcttccaggaaaacttccagaaatacgcctcaggggtggccaaggaggtggccgaagccggtccccgcaccgagtga

SEQ ID NO: 1322 - protein, 529 aa, Thermus thermophilus [sequence omitted]

SEQ ID NO: 1323 - DNA, 1566 bp, Thermoanaerobacter tengcongensis
  CDS (1)..(1566): transl_table=11
atgcttaaccttgaaagattgggtttaatcaattttaaaaacgtttaccgaaatttgcccgtagcaaaactgatagaagaagctgtaaaaagagaggaaggagtacttgtaaataacggcgcctttaatgtgtacactggaaaatacacaggtcgatctccaaatgacaagttcattgtagacgaaccagaagttcatgaggatatatggtgggaaaataacaagcctatttccgtagaaaagtttgaaaagctgtacaataggcttattgcctatttacaaaacagagacctttttattttcgacggatttgtaggtgcagaccctcaatatagagtctccataagagtgataacagaatacgcttatcaaagtttaatggcaagacagcttttcatacgccccactgaaaaagaattacaaaattttgtcccggaatatactttaatcgcagcacctcgctttaaagcaatccccgaaattgacggtgttaactctgaggcttttatcatcttaagttttacaaaaaagctcataattattggaggcacccagtacggtggagaaatcaaaaaatccatattcaccttaatgaactaccttatgcctaaaaaaggcgtgctttccatgcattgttctgctaatataggaaaagacggtgacacagcccttttcttcggcctctccggtacaggaaagaccactctctctgcagaccctgaaagatttttaattggcgatgatgaacacggttggtctgaaagagggatttttaattttgaaggtggctgttatgctaagtgcatcaatctttcaagagaaaaagagcctcaaatatgggattcaataaggtttggcgcaattcttgaaaacgttgtatacgatgaagccacaagggaacttgactacacaagtgacaaaatcactgaaaacacgcgagcagcatatccaattgactttatacctggggcagttcaaagcgggataggaggacatcctaagactataatatttttgactgcagatgcgtttggagtactgcctcctatagcaaaactcacaaaagagcaggcaatgtactactttctgtccggatataccagtaaactcgctggaacagaaaggggaattacagagccacaagccactttttccacttgctttggtgctcccttcttacctttacctccaatggtatatgctaaaatgcttggagaaaaaattgaaaaatacgacacaaaagtctttttggtgaatactggatggtcaggaggcccttatggaattggaaagcgaataaacttagaatacaccagaaaaatggtatctgctgccttaaaaggagaattagataaagtagaatttaccaaagaccctatatttaatcttaacatccctgcttcttgtcccggagtaccttctgaaatcttaaaccccagaaatacatggaaagataaagaagagtatgacaaaacggcaaaaagactagcccaaaggtttatagaaaattttcaaaaatacaaagaggtaagtgaagaaataaaaaatgctggcccgaaagggtaa

SEQ ID NO: 1324 - protein, 521 aa, Thermoanaerobacter tengcongensis
MLNLERLGLINFKNVYRNLPVAKLIEEAVKREEGVLVNNGAFNVYTGKYTGRSPNDKFIVDEPEVHEDIWWENNKPISVEKFEKLYNRLIAYLQNRDLFIFDGFVGADPQYRVSIRVITEYAYQSLMARQLFIRPTEKELQNFVPEYTLIAAPRFKAIPEIDGVNSEAFIILSFTKKLIIIGGTQYGGEIKKSIFTLMNYLMPKKGVLSMHCSANIGKDGDTALFFGLSGTGKTTLSADPERFLIGDDEHGWSERGIFNFEGGCYAKCINLSREKEPQIWDSIRFGAILENVVYDEATRELDYTSDKITENTRAAYPIDFIPGAVQSGIGGHPKTIIFLTADAFGVLPPIAKLTKEQAMYYFLSGYTSKLAGTERGITEPQATFSTCFGAPFLPLPPMVYAKMLGEKIEKYDTKVFLVNTGWSGGPYGIGKRINLEYTRKMVSAALKGELDKVEFTKDPIFNLNIPASCPGVPSEILNPRNTWKDKEEYDKTAKRLAQRFIENFQKYKEVSEEIKNAGPKG

SEQ ID NO: 1325 - DNA, 1629 bp, Vibrio cholerae
  CDS (1)..(1629): transl_table=11
atgaccgttatggaacatactaaggctgcacaaatcgacctagcccaatatgggatcaccggcgtaactgaactggttcgtaacccgagctatgaaatgttatttgccgaagaaacccgttcagatctcgaaggttatgaacgtggtgtggtgactgaattgggtgctgttgcggttgatactggcatcttcactggccgctcaccaaaagataagtttatcgttaaagatgataccactcgcgatacgctgtggtggacgtcagacaaagcgaaaaacgacaacaaaccgatcaatcaagaagtgtggaatgacctgaaagccttggtgaccaagcagctttctggtaaacgcgtatttgtgctcgatggctactgtggtgccaacgccgatactcgcttaagtgttcgcttcatcaccgaagtagcatggcaagcacactttgtgaaaaacatgttcattcgtccaagcgaagaagagctggcacactttaaaccagactttgtcgtaatgaacggcgcaaaatgtaccaatgcgaagtggaaagagcacggtctgaactcagaaaacttcactgtgtttaacctgaccgagcgcatgcagctcatcggcggtacttggtacggcggtgagatgaaaaaaggtatgttcgcgatgatgaactacttcctgccgctacaaggcattgcctctatgcactgctctgccaacatgggtaaagcgggcgatgtcgctatcttcttcggtctttctggtacgggtaaaaccaccctatccaccgatccaaaacgtgcgttaattggtgacgatgagcacggctgggatgatgatggcgtgttcaactttgaaggcggctgctacgcgaaaaccatcaagctgtccaaagaagcagagccggatatctataacgcgatccgccgtgatgctctactggaaaacgtcacggttcgtagtgatggttcgattgattttgatgatggttcaaaaaccgagaacacccgtgtttcttaccctatttatcacatcgacaatatcgtaaaaccagtttccaaaggcggtcatgcgactaaggtgatcttcctgtctgccgatgcgtttggcgtattgcctccagtttcaaaactgacgccagagcaaaccaagtaccacttcttgtctggctttacggctaaactggcgggtactgagcgtggcattactgaacctaccccaaccttctccgcctgttttggcgcagcgttcctcactctgcacccaactcagtatgcagaagtgctggtaaaacgtatggaagcggcgggcgccgaagcctatctggttaacacaggttggaacggcagcggtaagcgcatctcaattaaagatacgcgcggtattatcgatgcgattttggatggttcgatcgaaaaagcggaaaccaaacatatcccaatctttaatctgcaagtgcccaccgcactgcccggcgtcgatcctatgatcctcgacccacgtgatacttatgttgacccactgcagtgggaaagcaaagccaaagacttggcaacgcgcttcatcaacaacttcgacaagtacacagataacgccgaaggtaaagcactggtcgccgcgggcccaaagctcgactaa

SEQ ID NO: 1326 - protein, 542 aa, Vibrio cholerae
MTVMEHTKAAQIDLAQYGITGVTELVRNPSYEMLFAEETRSDLEGYERGVVTELGAVAVDTGIFTGRSPKDKFIVKDDTTRDTLWWTSDKAKNDNKPINQEVWNDLKALVTKQLSGKRVFVLDGYCGANADTRLSVRFITEVAWQAHFVKNMFIRPSEEELAHFKPDFVVMNGAKCTNAKWKEHGLNSENFTVFNLTERMQLIGGTWYGGEMKKGMFAMMNYFLPLQGIASMHCSANMGKAGDVAIFFGLSGTGKTTLSTDPKRALIGDDEHGWDDDGVFNFEGGCYAKTIKLSKEAEPDIYNAIRRDALLENVTVRSDGSIDFDDGSKTENTRVSYPIYHIDNIVKPVSKGGHATKVIFLSADAFGVLPPVSKLTPEQTKYHFLSGFTAKLAGTERGITEPTPTFSACFGAAFLTLHPTQYAEVLVKRMEAAGAEAYLVNTGWNGSGKRISIKDTRGIIDAILDGSIEKAETKHIPIFNLQVPTALPGVDPMILDPRDTYVDPLQWESKAKDLATRFINNFDKYTDNAEGKALVAAGPKLD

SEQ ID NO: 1327 - DNA, 1629 bp, Vibrio parahaemolyticus
  CDS (1)..(1629): transl_table=11
atgaccgttatggaacatacaaaggctgcaacacttgatctaaccaaacacggactgcataacgttaaagaggttgttcgcaacccaagctacgaattgctgtttgaggaagaaacgcgcgctgacctaactggttacgaacgcggtgtggttactgaattaggtgcggttgctgttgatacaggcatctttactggtcgctcaccaaaagataaatacatcgttaaagatgcgacgacagaagaacacatgtggtggacttctgacaccgtaaaaaatgacaacaaaccaatcactcaggaagtgtggaacgacctaaaagagttggtgactaaccagttgtctggcaaacgcctatttgtcgttgacggttattgtggtgctaacccagatactcgcttgagcattcgtgtgatcacggaagtagcatggcaagcacacttcgtaaaaaacatgttcattcgtcctaccgaagaagaacttgcaacgtttgaacctgacttcgtagtaatgaacggcgcgaaatgcaccaacccgaaatgggaagagcaaggtctgaactctgaaaacttcacggtcttcaaccttactgagcgtacacaactgatcggtggtacgtggtacggcggcgagatgaagaaaggcatgttcgcgatgatgaactacttccttcctctgaaagacatcgcttcgatgcactgtagtgccaacatgggcaaagacggcgacgtagcagtattcttcggcctatctggtacaggtaaaacaacactctctaccgaccctaaacgcgctctaattggtgatgatgagcacggctgggatgacgatggtgtcttcaacttcgaaggcggttgttacgcgaaaaccatcaagctatcgaaagaagcggagccagacatctacaacgcgatccgccgcgatgcgctgctagaaaacgtaacggttcgtagcgatggctctatcgattttgatgacggttctaagacagaaaacacacgtgtttcttaccctatctaccacatcgaaaacatcgttaagccagtatcaaaaggcggtcacgcaaacaaagtgatcttcctatcggcagacgcatttggcgtgttaccgccagtatctaagttgactccagagcaaaccaaataccacttcctatctggctttactgcaaaactggctggcacagagcgaggcattactgagccaacaccaacattctctgcatgttttggcgcagcgttcttaacgcttcacccaactaaatacgcagaagtactggtaaaacgtatggaagccgcaggtgcagaagcatacctagtgaacaccggctggaacggcacaggtaaacgtatctctatccaagatacgcgcggcatcattgatgcgatcctagatggctcgattgaagatgcgccaactaagcacatcccaatcttcaaccttgaagtaccgacttcactaccaggtgtggatccaagcatccttgaccctcgtgacacgtacgttgacccactacaatgggaaagcaaagcgaaagacttggctgagcgctttatcaataactttgataagtacacagacaacgcggaaggtaaagcactggttgcggctggtcctcaactggactaa

SEQ ID NO: 1328 - protein, 542 aa, Vibrio parahaemolyticus
MTVMEHTKAATLDLTKHGLHNVKEVVRNPSYELLFEEETRADLTGYERGVVTELGAVAVDTGIFTGRSPKDKYIVKDATTEEHMWWTSDTVKNDNKPITQEVWNDLKELVTNQLSGKRLFVVDGYCGANPDTRLSIRVITEVAWQAHFVKNMFIRPTEEELATFEPDFVVMNGAKCTNPKWEEQGLNSENFTVFNLTERTQLIGGTWYGGEMKKGMFAMMNYFLPLKDIASMHCSANMGKDGDVAVFFGLSGTGKTTLSTDPKRALIGDDEHGWDDDGVFNFEGGCYAKTIKLSKEAEPDIYNAIRRDALLENVTVRSDGSIDFDDGSKTENTRVSYPIYHIENIVKPVSKGGHANKVIFLSADAFGVLPPVSKLTPEQTKYHFLSGFTAKLAGTERGITEPTPTFSACFGAAFLTLHPTKYAEVLVKRMEAAGAEAYLVNTGWNGTGKRISIQDTRGIIDAILDGSIEDAPTKHIPIFNLEVPTSLPGVDPSILDPRDTYVDPLQWESKAKDLAERFINNFDKYTDNAEGKALVAAGPQLD

SEQ ID NO: 1329 - DNA, 1629 bp, Vibrio vulnificus
  CDS (1)..(1629): transl_table=11
atgaccgttatggaacatacaaaggctgcatcaattgatctaaccaagcatggtcttcgcaacgtaaaagaggttgtgcgcaacccaagttacgaaatgctgtttgcagaagagactcgagctgatctcgaaggctacgaaaaaggcgtagtgacagagctcggcgcggtggctgtagacacaggcatcttcactggccgctcaccaaaagacaaatacattgtgaaagatgcgacaaccgaagaacatatgtggtggacaacaccagccgtcccgaacgataacaagccaatcacacaagaagtgtggaatgacctaaaacaactggtcactaaccagctttctggcaagcgcgtttttgtcattgatggttattgtggtgctaaccctgatacccgtcttagcattcgagtcatcaccgaagtggcgtggcaagcgcatttcgttaagaacatgttcattcgtccgaccgaagaagaattggccagctttgagcctgatttcgtggtgatgaatggtgcgaaatgcaccaaccaaaagtggaaagagcacggtctgaactctgaaaacttcacggtgtttaacctaactgagcgcatgcagttgatcggcggtacttggtacggcggtgagatgaagaaaggcatgttcgcgatgatgaactacttcctgcctcttaaaggcattgcgtcgatgcactgttctgccaacatgggcaaagaaggtgatgtggcgatcttcttcggtctatctggtacgggtaaaacaacgctgtcgaccgatccaaaacgcgcactaattggcgatgacgagcacggctgggatgacgacggcgtgtttaacttcgaaggcggttgttacgcgaaaaccatcaagctgtcaaaagaagctgagcctgatatttacaatgccatccgccgcaatgcactgcttgaaaacgtgaccgttcgcaatgacggctcgatcaactttgatgatggttcgaaaaccgagaacactcgcgtttcttacccaatccatcacattgaaaacatcgttaagccagtatcaaaaggcggtcatgccaacaaagtgatcttcctttctgccgatgcgtttggcgtgttgcctccggtgtctaaactgaccccagaacaaactaagtatcacttcctatctggctttactgcgaagttggctggtactgagcgtggtattactgaaccaacaccaactttctctgcgtgttttggtgccgcgttcctgacgcttcacccaaccaagtacgctgaagtactggtaaaacgtatggaagaagcaggggcagaagcctacctcgtcaatactggttggaacggtagcggcaagcgcatctcaatccaagatacgcgcggtattatcgatgcgatccttgatggttctattgaagaagcgccaaccaaacacgtgcctatcttcaatctagaagtaccaacatcacttcctggtgtggatccaaccatccttgatccacgtgacacttacgttgacccgctacagtgggaaagcaaagcgcaagatcttgctcaacgctttatcaataacttcgctaagtacaccgacaacgcggaaggtcaatcacttgtggctgcaggcccacaactcgattag

SEQ ID NO: 1330 - protein, 542 aa, Vibrio vulnificus
MTVMEHTKAASIDLTKHGLRNVKEVVRNPSYEMLFAEETRADLEGYEKGVVTELGAVAVDTGIFTGRSPKDKYIVKDATTEEHMWWTTPAVPNDNKPITQEVWNDLKQLVTNQLSGKRVFVIDGYCGANPDTRLSIRVITEVAWQAHFVKNMFIRPTEEELASFEPDFVVMNGAKCTNQKWKEHGLNSENFTVFNLTERMQLIGGTWYGGEMKKGMFAMMNYFLPLKGIASMHCSANMGKEGDVAIFFGLSGTGKTTLSTDPKRALIGDDEHGWDDDGVFNFEGGCYAKTIKLSKEAEPDIYNAIRRNALLENVTVRNDGSINFDDGSKTENTRVSYPIHHIENIVKPVSKGGHANKVIFLSADAFGVLPPVSKLTPEQTKYHFLSGFTAKLAGTERGITEPTPTFSACFGAAFLTLHPTKYAEVLVKRMEEAGAEAYLVNTGWNGSGKRISIQDTRGIIDAILDGSIEEAPTKHVPIFNLEVPTSLPGVDPTILDPRDTYVDPLQWESKAQDLAQRFINNFAKYTDNAEGQSLVAAGPQLD

SEQ ID NO: 1331 - DNA, 1626 bp, Wigglesworthia glossinidia brevipalpis
  CDS (1)..(1626): transl_table=11
atgaaaaataaagaaaatattttgattactttaaatcaagtcggcatagagcaatattctaatattatttataatccaaattatgacactttatttaaagaagaaactaataaaaatttaaaaggattagaaagatgtatattgactaaattacaagcaattgctgtagacacaggaaaatttactggaagatctccaaaagataaatattatgtaagagatgaaaaaacaaaaaacattatttggtggtcagacgataataatcacaaaagtaataatcatcctataaacaacgaaacatggaaagatctaaaaaaattaattgcaaataatttaaataataaaaaattatttgtaatagacgctttttgcggtgctaataaaaaaaatagattaaaagtaagatttattactgatatcgcatggcaagctcatttttttaaaaacatgtttatagaaccaatcgaacaagaattaaataaatttttacaagattttaccgtatttagtgttccaaaagcaattaataaaaaatggaaagatcataaattaaattcagaaaattttattgcaataaatttaactgaaaatactttgttgataggtggaacatggtatggaggtgaaataaaaaaaggtttattttctgtaatgaattacatattacctttaaaaaatatagcatctatgcattgttctgccaatgagggatttaaaaaagacgtagctttattttttggactatcaggaactggaaaaactacattatctactgactcaaaaagatatttaataggagatgatgagcatggatggtgtaaggatggtgtttttaattttgaaggaggatgttatgctaaaactattaacttatctgaagaaaaagaaccagaaatttttaatgctataaaaaaaaatgctattttagaaaatgttatggtattgaaagattcaaacataaacttttttgatggaacaaaaacagaaaattctagagtatcatatccaattaatcatattaaaaatatagttaagcctatttcccagtcaggacatcctaagaatattatatttttaacagcagatgcatttggagtattcccatttgtttctaaattatcatattttcaaggacaatattattttttatctggatttacatctaaattatctggaacagaacgtggaataattgatccagaacctactttttcctcttgttttggtgaagcttttttatctttacatcctactgtttatgctaaaatattattaagatatataaaatattataattcaaaaatatttttagttaatacaggatggaatggtaaaagagaaagatattctcttgaatatacaagatcaataataaacgctattctagatgataaaatagaatttattgatgaaaattatataccaattttcaatttgaaaattccaaagaaaattgaaggagtgcctgatctatttttagatcctagaaattttttttcttcaaatgaagaatggatcaaacaagcaactattttatctaaaaaatttattaaaaattttaaaaaattttcacatacaaagttaggaaaaaaattaattaaatttgaaccaaaaattaatttttaa

SEQ ID NO: 1332 - protein, 541 aa, Wigglesworthia glossinidia brevipalpis
MKNKENILITLNQVGIEQYSNIIYNPNYDTLFKEETNKNLKGLERCILTKLQAIAVDTGKFTGRSPKDKYYVRDEKTKNIIWWSDDNNHKSNNHPINNETWKDLKKLIANNLNNKKLFVIDAFCGANKKNRLKVRFITDIAWQAHFFKNMFIEPIEQELNKFLQDFTVFSVPKAINKKWKDHKLNSENFIAINLTENTLLIGGTWYGGEIKKGLFSVMNYILPLKNIASMHCSANEGFKKDVALFFGLSGTGKTTLSTDSKRYLIGDDEHGWCKDGVFNFEGGCYAKTINLSEEKEPEIFNAIKKNAILENVMVLKDSNINFFDGTKTENSRVSYPINHIKNIVKPISQSGHPKNIIFLTADAFGVFPFVSKLSYFQGQYYFLSGFTSKLSGTERGIIDPEPTFSSCFGEAFLSLHPTVYAKILLRYIKYYNSKIFLVNTGWNGKRERYSLEYTRSIINAILDDKIEFIDENYIPIFNLKIPKKIEGVPDLFLDPRNFFSSNEEWIKQATILSKKFIKNFKKFSHTKLGKKLIKFEPKINF

SEQ ID NO: 1333 - DNA, 1620 bp, Yersinia pestis
  CDS (1)..(1620): transl_table=11
atgagtgttaaaggaattaccccgcaggagctcgccgcctatggcatccataacgtcagcgagattgtttacaacccaagctatgatttactgtttgaagaagagactaaacccacgttggaaggatacgagcgtggcacactgacgactaccggcgcaatagcggtagataccggtatttttaccgggcgttcacccaaagataaatatattgtccgcgatgctatcactcaggataccgtgtggtgggccgatcagggcaaaggtaaaaatgataataagcctctgagccaagagatctggaaccatttgaaaggtctggtgacggaacaactctctggcaaacgcctctttgttgtcgatacattctgcggtgctaatgcggatacccgcctgcaagtccgctttatcacggaagtcgcttggcaggcacacttcgtcaaaaatatgtttatccgtccatcagatgaagaactggctcggtttgaacctgactttatcgtgatgaacggtgccaaatgcactaacccacaatggaaagagcagggcctgaattcagaaaactttgtcgcctttaatctgacagaacgtatgcagttgattggtggcacgtggtatggcggcgaaatgaagaaagggatgttctcaatgatgaactacctgctgccactgaaaggcattgcttcaatgcattgttcagctaacgtcggcgaaaaaggcgatgttgccatcttcttcggtctgtcgggtaccggtaaaaccactttatctaccgatccaaaacgcaagttgatcggtgatgatgaacatggctgggatgatgatggcgtctttaacttcgagggggggtgctacgctaaaaccatcaagttatctgaagaagcagagccagatatttaccacgccattaaacgcgacgccttgctggaaaacgtggtggtgctagcagacggtaccgttgattttaatgacggttctaaaactgaaaacacccgtgtctcttatccgatttaccacattgataacattgttaaaccggtgtccaaagcaggccatgcgaccaaggttatcttcctgactgccgatgcctttggtgtgctccccccagtatctcgtctgaccgcaaaccagactcaatatcacttcctctctggctttactgccaaactggcagggacagagcgtggcgtcacggagccaacaccaaccttctctgcttgctttggtgcggccttcctgtcgctgcacccaacgcagtacgctgaagtgctggttaagcgtatgcaagcggttggcgcacaagcctatctggtcaataccggttggaacgggacaggtaagcgtatttccatcaaggatacccgcgccattattgacgcaatcctaaacggggagattgataaggcagaaacctttacgctgccaatctttgatctggcagtccctatggcgttacccggtgtgaatcccgatatcctcgatcctcgcgacacctacgccgataaagcgcaatggcaagagaaagccgaagatttggcgaaacgctttgcgactaactttgataaatacactgatacccctgcgggggccgcgttggttagcgcggggccaaagatctaa

SEQ ID NO: 1334 - protein, 539 aa, Yersinia pestis
MSVKGITPQELAAYGIHNVSEIVYNPSYDLLFEEETKPTLEGYERGTLTTTGAIAVDTGIFTGRSPKDKYIVRDAITQDTVWWADQGKGKNDNKPLSQEIWNHLKGLVTEQLSGKRLFVVDTFCGANADTRLQVRFITEVAWQAHFVKNMFIRPSDEELARFEPDFIVMNGAKCTNPQWKEQGLNSENFVAFNLTERMQLIGGTWYGGEMKKGMFSMMNYLLPLKGIASMHCSANVGEKGDVAIFFGLSGTGKTTLSTDPKRKLIGDDEHGWDDDGVFNFEGGCYAKTIKLSEEAEPDIYHAIKRDALLENVVVLADGTVDFNDGSKTENTRVSYPIYHIDNIVKPVSKAGHATKVIFLTADAFGVLPPVSRLTANQTQYHFLSGFTAKLAGTERGVTEPTPTFSACFGAAFLSLHPTQYAEVLVKRMQAVGAQAYLVNTGWNGTGKRISIKDTRAIIDAILNGEIDKAETFTLPIFDLAVPMALPGVNPDILDPRDTYADKAQWQEKAEDLAKRFATNFDKYTDTPAGAALVSAGPKI

SEQ ID NO: 1335 - DNA, 1620 bp, Yersinia pseudotuberculosis
  CDS (1)..(1620): transl_table=11
atgagtgttaaaggaattaccccgcaggagctcgccgcctatggcatccataacgtcagcgagattgtttacaacccaagctatgatttactgtttgaagaagagaccaaacccacgttggaaggatacgaacgtggcacactgacgactaccggcgcaatagcggtagataccggtatttttaccgggcgttcacccaaagataaatatattgtccgcgatgctatcactcaggataccgtgtggtgggccgatcagggcaaaggtaaaaatgataataagcctctgagccaagagatctggagccatttgaaaggtctggtgacggaacaactctctggcaaacgcctctttgttgtcgatacattctgcggtgctaatgcggatacccgcctgcaagtccgctttatcacagaagtcgcttggcaggcacacttcgtcaaaaatatgtttatccgtccatcagatgaagaactggctcggtttgaacctgactttatcgtgatgaacggtgccaaatgcactaacccacaatggaaagagcagggcctgaattcagaaaactttgtcgcctttaatctgacagaacgtatgcagttgattggtggcacgtggtatggcggcgaaatgaagaaagggatgttctcaatgatgaactacctgctgccactgaaaggcattgcttcaatgcattgttcagctaacgtcggcgaaaaaggcgatgttgccatcttcttcggtctgtcgggtaccggtaaaaccactttatctaccgatccaaaacgcaagttgatcggtgatgatgaacatggctgggatgatgatggcgtctttaacttcgagggggggtgctacgctaaaaccatcaagttatctgaagaagcagagccagatatttaccacgccattaaacgcgacgccttgctggaaaacgtggtggtgctagcagacggtaccgttgattttaatgacggttctaaaactgaaaacacccgtgtctcttatccgatttaccacattgataacattgttaaaccggtgtccaaagcaggccatgcgaccaaggttatcttcctgactgccgatgcctttggtgtgctccccccagtatctcgtctgaccgcaaaccagacgcaatatcacttcctctctggctttactgccaaactggcagggacagagcgtggcgtcacggagccaacaccaaccttctctgcttgctttggtgcggccttcctgtctctgcacccaacgcagtacgctgaagtgctggttaagcgtatgcaagcggttggcgcacaagcctatctggtcaataccggttggaacgggacaggtaagcgtatttccatcaaggatacccgcgccattattgacgcaatcctaaacggggagattgataaggcagaaacctttacgctgccaatctttgatctggcagtccctatggcgttacccggtgtgaatcccgatatcctcgatcctcgcgacacctacgccgataaagcgcaatggcaagagaaagccgaagatttggcgaaacgctttgcgactaactttgataaatacactgatacccctgcgggggccgcgttggttagcgcggggccaaagatctaa

SEQ ID NO: 1336 - protein, 539 aa, Yersinia pseudotuberculosis
MSVKGITPQELAAYGIHNVSEIVYNPSYDLLFEEETKPTLEGYERGTLTTTGAIAVDTGIFTGRSPKDKYIVRDAITQDTVWWADQGKGKNDNKPLSQEIWSHLKGLVTEQLSGKRLFVVDTFCGANADTRLQVRFITEVAWQAHFVKNMFIRPSDEELARFEPDFIVMNGAKCTNPQWKEQGLNSENFVAFNLTERMQLIGGTWYGGEMKKGMFSMMNYLLPLKGIASMHCSANVGEKGDVAIFFGLSGTGKTTLSTDPKRKLIGDDEHGWDDDGVFNFEGGCYAKTIKLSEEAEPDIYHAIKRDALLENVVVLADGTVDFNDGSKTENTRVSYPIYHIDNIVKPVSKAGHATKVIFLTADAFGVLPPVSRLTANQTQYHFLSGFTAKLAGTERGVTEPTPTFSACFGAAFLSLHPTQYAEVLVKRMQAVGAQAYLVNTGWNGTGKRISIKDTRAIIDAILNGEIDKAETFTLPIFDLAVPMALPGVNPDILDPRDTYADKAQWQEKAEDLAKRFATNFDKYTDTPAGAALVSAGPKI

SEQ ID NO: 1337 - DNA, 2010 bp, Brassica napus
  CDS (1)..(2010)
atgtcggcaggtaacggaaatgctaacggtgacggaggcttcagcttcccgaaaggaccagcgatgccgaagataacgacgggagctaagaggggtagcgaaatatgccacgatgacagtggtccgacggtgaaggcaacgacgatcgatgagcttcactcgttgcagaagaagcgttctgctcccaccacacctattaaccagagcggcgccgccgctttcgccgccgtctcggaggaggagcgccagaagattcaactccagtctatcagtgcatcattggcgtcgttgacgagagagtctggacccaaagtggtgagaggagatccggcggagaagaaggccgacggttccactactccggcgtacgcacacggccagcatcactccatcttctctccggacttaggagcagtcagtgacagctccttgaaattcacccacgtcctctacaacctctcccctgcagagctctacgagcaagctatcaagtacgagaaaggctcgttcatcacttctaatggagctttggcgacgctttctggtgccaagactggtcgtgctccgagggataagcgtgtcgttagagatgccacgacagagggcgagctttggtggggaaagggttcgcctaatatcgagatggatgaacataccttcatggtgaacagagaaagagccgttgattacttgaactccttggaaaaggtgtttgtgaatgatcagttcttgaactgggacccggagaacagaatcaaagtcagaatcgtctcagctagagcttaccactctctcttcatgcacaacatgtgtatccgaccaactccagaggagcttgagagcttcggtactccggacttcactatatacaacgctgggcagtttccgtgtaaccgttacactcactacatgacttcctccactagcgtagacctgaatctcagtaggagggagatggttatactgggaactcagtatgctggtgagatgaagaagggtctcttcagtgtgatgcactaccttatgcctaagcgtcggatcctctcccttcactctggttgcaatatgggcaaagagggagatgttgctctcttctttggactctcagggactgggaagacaacgctgtctactgatcacaacaggtacctgattggagatgatgagcattgttggactgagactggtgtctcgaacattgagggtggatgctatgccaagtgcgttgatctttcgagggagaaggagcctgatatctggaacgctatcaagtttggaacagttttggaaaatgttgtgtttgatgagcacaccagagaagtggattattctgataaatccgttacagagaacacgcgtgccgcctacccgattgagttcattccaaatgcgaaaataccttgcgttggtccacaccctaaaaacgtgattcttctggcatgtgatgcctttggtgttctcccgcctgtgagcaagctgaacctggcgcaaaccatgtaccacttcattagtggttacactgctctggttgctgggacagaggacggtatcaaggagccaacagcaacattctcagcatgctttggtgcagctttcataatgctgcatcctaccaagtacgcagctatgttagccgagaagatgaagacgcaaggtgctactggatggctcgttaacactggctggtctggtggcagctatggagttggaaacaggatcaagctggcgtatactaggaagatcatcgatgcaatccattcaggtagcttgttgaaggcgaactacaagaaaaccgagatatttgggtttgaaatcccaactgagatcgaagggataccttcagagatcttggatccgatcaactcgtggtctgataagaaagcacacaaggagactctgttgaagctgggaggtttgttcaagaagaactttgagacgttcgctaaccacaagattggtgtggatggtaagctcacggaggagattctcgctgctggtcctatcttttaa

SEQ ID NO: 1338 - protein, 669 aa, Brassica napus
MSAGNGNANGDGGFSFPKGPAMPKITTGAKRGSEICHDDSGPTVKATTIDELHSLQKKRSAPTTPINQSGAAAFAAVSEEERQKIQLQSISASLASLTRESGPKVVRGDPAEKKADGSTTPAYAHGQHHSIFSPDLGAVSDSSLKFTHVLYNLSPAELYEQAIKYEKGSFITSNGALATLSGAKTGRAPRDKRVVRDATTEGELWWGKGSPNIEMDEHTFMVNRERAVDYLNSLEKVFVNDQFLNWDPENRIKVRIVSARAYHSLFMHNMCIRPTPEELESFGTPDFTIYNAGQFPCNRYTHYMTSSTSVDLNLSRREMVILGTQYAGEMKKGLFSVMHYLMPKRRILSLHSGCNMGKEGDVALFFGLSGTGKTTLSTDHNRYLIGDDEHCWTETGVSNIEGGCYAKCVDLSREKEPDIWNAIKFGTVLENVVFDEHTREVDYSDKSVTENTRAAYPIEFIPNAKIPCVGPHPKNVILLACDAFGVLPPVSKLNLAQTMYHFISGYTALVAGTEDGIKEPTATFSACFGAAFIMLHPTKYAAMLAEKMKTQGATGWLVNTGWSGGSYGVGNRIKLAYTRKIIDAIHSGSLLKANYKKTEIFGFEIPTEIEGIPSEILDPINSWSDKKAHKETLLKLGGLFKKNFETFANHKIGVDGKLTEEILAAGPIF

SEQ ID NO: 1339 - DNA, 2004 bp, Zea mays
  CDS (1)..(2004)
atggcgacgccgaacgggcttgcgcggatcgagacgaccgggaagaagaagcaggacaacggcgtgtggtacgacgacagctcggcgccggtgcgcgcgcagaccatcgacgagctgcactcgctgcagcggaagcggtcggcgcccagcacgcccaagcggtcggcgcccaccacgcccatcaagggcggtgcccactcgcccttcgccgtcgcgatctccgaggaggagcgccacacgcagcagatgcagtccatcagtgcgtcgttggcgtctctgacgcgtgaaaccgggccgaaagtggtcaagggcgacccggccgcgaagggcgaggccgccgcgcagggcgcgccatcgacgccgagggcgcaccagcagcaccgccaccccgccgcccccgccatcgccgtcagcgacagctccctcaagttcactcatgtgctcaacaacctctcgcctgctgagctgtacgagcaggccatcaagtacgagaaggggtcgttcatcacgtccaccggcgcgctggcgacgctgtccggtgccaagaccgggcggtctcccagggacaagcgcgtcgtcaaggacgaggtcaccgcgcaggacctgtggtggggcaagggctcgcccaacatcgagatggacgagaagacgttcctgatcaacagggagagggccgtcgactacctcaactccctggagaaggtgttcgtcaacgaccagtacctcaactgggaccccgagaaccggatcaaggtccgcatcatctccgccagggcgtaccactccctcttcatgcacaacatgtgcatccgccccacggacgaggagctggaggacttcggcacgccggacttcaccatctacaacgcagggcagttcccctgcaaccgctacacccactacatgacgtcgtccacgagcatagacctcaacctcgccaggagggagatggtgatcatgggcacgcagtacgccggcgagatgaagaaggggctcttcggcgtcatgcactacctcatgcccaagcgcggcatcctctcgctgcactccggctgcaatatgggcaaggacggcgacgtcgccctcttctttggcctctcaggtaccgggaagacgacgctgtcgacggatcacaacaggcttctgatcggcgacgacgagcactgctggagcgacaatggcgtgtccaacatcgagggcggctgctacgccaagtgcatcgacctggcgcaggagaaagaacctgatatttggaacgccatcaagtttggaactgtgctggagaacgtggtctttgatgagcatactcgtgaagtcgactacgccgacaactctgtcaccgagaacactcgggctgcctacccgatcgagtacatccccaacgccaagataccatgcgtcggcccgcaccccaagaacgtgatcctcctggcgtgcgacgccttcggcgtgctcccgccggtgagcaagctgaacctggcgcagaccatgtaccacttcatcagcggctacaccgctctggtcgccggcacggaggacggcatcaaggagccgcaggccaccttctccgcctgcttcggcgcggccttcatcatgctccacccgaccaagtacgccgccatgctcgccgagaagatgcagaagtacggcgccaccgggtggctcgtcaacaccggctggtcgggtggcaggtacggcgtgggcaagaggatcaggcttccctacaccagaaagatcatcgacgccatccactccggcgagctcctcaccgccaactaccagaagaccgaggtgtttggcctggagatccccactgagatcaacggcgtgccgtcggaaatcctcgacccgatcaacacctggacggacaaggccgcgtacaaggagaatctcctgaggctcggcgggctcttcaagaagaacttcgaggtgttcgccagctacaagatcggggacgacagcagcctgactgacgagatcctcgccgcaggccccaacttctga

SEQ ID NO: 1340 - protein, 667 aa, Zea mays
MATPNGLARIETTGKKKQDNGVWYDDSSAPVRAQTIDELHSLQRKRSAPSTPKRSAPTTPIKGGAHSPFAVAISEEERHTQQMQSISASLASLTRETGPKVVKGDPAAKGEAAAQGAPSTPRAHQQHRHPAAPAIAVSDSSLKFTHVLNNLSPAELYEQAIKYEKGSFITSTGALATLSGAKTGRSPRDKRVVKDEVTAQDLWWGKGSPNIEMDEKTFLINRERAVDYLNSLEKVFVNDQYLNWDPENRIKVRIISARAYHSLFMHNMCIRPTDEELEDFGTPDFTIYNAGQFPCNRYTHYMTSSTSIDLNLARREMVIMGTQYAGEMKKGLFGVMHYLMPKRGILSLHSGCNMGKDGDVALFFGLSGTGKTTLSTDHNRLLIGDDEHCWSDNGVSNIEGGCYAKCIDLAQEKEPDIWNAIKFGTVLENVVFDEHTREVDYADNSVTENTRAAYPIEYIPNAKIPCVGPHPKNVILLACDAFGVLPPVSKLNLAQTMYHFISGYTALVAGTEDGIKEPQATFSACFGAAFIMLHPTKYAAMLAEKMQKYGATGWLVNTGWSGGRYGVGKRIRLPYTRKIIDAIHSGELLTANYQKTEVFGLEIPTEINGVPSEILDPINTWTDKAAYKENLLRLGGLFKKNFEVFASYKIGDDSSLTDEILAAGPNF

SEQ ID NO: 1341 - DNA, 1980 bp, Zea mays
  CDS (1)..(1980)
atggcgacgccgaacgggcttgctcggatcgagacgaacggggcgaccaagcccgacaacggcgtgtgccacgacgacagctcggcgccggtgcgcgcgcagaccatcgacgagctgcactcgctgcagcggaagcggtcggcgccaaccacgcccatcaaggacggcgccgcctcgaccttcgccgccgcgctctccgaggaggagcgccacaggcagcagctgcagtccatcagcgcgtcgttggcgtctctgacacgtgaaaccgggccgaaagtggtcaagggcgacccggcccggaggggcgaggcccccgcgacgggtgcaccgccgacgccgcaggcgcaccaccagcaccaccaccccgccgcccccaccatcgccgtcagcgacagctccctcaagttcacccatgtcctctacaacctctcgcctgctgagctgtacgagcaggccatcaagtacgagaaggggtcgttcatcacgtccaccggcgcgctggcgacgctgtccggcgccaagaccgggcggtcgcccagggacaagcgcgtcgtcaaggacgaggtcgcggcgcgggacctgtggtggggcaagggctcgcccaacatcgagatggacgagcacacgttcctgaccaacagggagagggccgtggactacctcaactccctggacaaggtgttcgtgaacgaccagttcctcaactgggaccccgagaaccggatcaaggtccgcatcatctccgccagggcgtaccactccctcttcatgcacaatatgtgcatccggcccacggacgaggagctggagagcttcggcacgccggacttcaccatctacaacgccggccagttcccctgtaaccgctacacgcactacatgacgtcgtccaccagcgtagacatcaacctcgccaggagggagatggtgatcctgggcacgcagtacgccggcgagatgaagaaggggctgttcggcgtcatgcactacctcatgcccaagcgcggcatcctctcgctgcactccggctgcaatatgggcaaggacggcgacgtcgccctcttctttggcctctcaggtaccgggaagacgacgctgtcgacggatcacaacaggcttctgatcggcgacgacgagcactgctggagcgagaatggcgtgtccaacatcgagggcggctgctatgccaagtgcatagacctgtcgcaggagaaagagcctgatatctggaacgccatcaagttcggagccgtgctggagaacgttgtcttcgatgagcatactcgtgaagttgactacaccgacaaatctgtcaccgagaacactcgggctgcctacccgatcgagtacatccccaacgccaagataccatgcgtcggtccacaccccaagaacgtgatcctgctggcgtgcgacgccttcggcgtgctcccgccggtgagcaagctggacctggcgcagaccatgtaccacttcatcagcggatacaccgccctggtcgccggcacggaggacggcatcaaggagccacaggccaccttctccgcctgcttcggcgcggccttcatcatgctccacccgaccaagtacgccgccatgctcgccgagaagatgcagaagtacggcgccacagggtggctcgtcaacaccggctggtctggcggcaggtacggtgtgggcaagaggatccggcttccctacaccaggaagatcatcgacgccatccactccggcgagcttctcaccgccaactaccagaagaccgaggtctttggcctggagatcccgactgagatcaagggcgtgccgtcggaaatcctcgacccaatcaacacctggacggacaaggccgcgtacaaggagacgctcctgaggcttgccgggctcttcaagaagaacttcgaggtgttcgccagctacaagatcggggacgacagcaacctgaccgacgagatcctcgccgcaggccccaacttctga

SEQ ID NO: 1342 - protein, 659 aa, Zea mays
MATPNGLARIETNGATKPDNGVCHDDSSAPVRAQTIDELHSLQRKRSAPTTPIKDGAASTFAAALSEEERHRQQLQSISASLASLTRETGPKVVKGDPARRGEAPATGAPPTPQAHHQHHHPAAPTIAVSDSSLKFTHVLYNLSPAELYEQAIKYEKGSFITSTGALATLSGAKTGRSPRDKRVVKDEVAARDLWWGKGSPNIEMDEHTFLTNRERAVDYLNSLDKVFVNDQFLNWDPENRIKVRIISARAYHSLFMHNMCIRPTDEELESFGTPDFTIYNAGQFPCNRYTHYMTSSTSVDINLARREMVILGTQYAGEMKKGLFGVMHYLMPKRGILSLHSGCNMGKDGDVALFFGLSGTGKTTLSTDHNRLLIGDDEHCWSENGVSNIEGGCYAKCIDLSQEKEPDIWNAIKFGAVLENVVFDEHTREVDYTDKSVTENTRAAYPIEYIPNAKIPCVGPHPKNVILLACDAFGVLPPVSKLDLAQTMYHFISGYTALVAGTEDGIKEPQATFSACFGAAFIMLHPTKYAAMLAEKMQKYGATGWLVNTGWSGGRYGVGKRIRLPYTRKIIDAIHSGELLTANYQKTEVFGLEIPTEIKGVPSEILDPINTWTDKAAYKETLLRLAGLFKKNFEVFASYKIGDDSNLTDEILAAGPNF

SEQ ID NO: 1343 - DNA, 25 bp, Artificial sequence
  primer
atgtccccttctaaaatgaatgcta

SEQ ID NO: 1344 - DNA, 23 bp, Artificial sequence
  primer
ttactcgaattgaggaccagcgg

SEQ ID NO: 1345 - protein, 519 aa, Artificial sequence
  consensus sequence
  Variant (3)..(7): Xaa in position 3 to 7 is any amino acid
  Variant (9)..(10): Xaa in position 9 to 10 is any amino acid
  Variant (16)..(16): Xaa in position 16 is any amino acid
  Variant (19)..(20): Xaa in position 19 to 20 is any amino acid
  Variant (22)..(30): Xaa in position 22 to 30 is any amino acid
  Variant (31)..(31): Xaa in position 31 is any or no amino acid
  Variant (33)..(34): Xaa in position 33 to 34 is any amino acid
  Variant (35)..(41): Xaa in position 35 to 41 is any or no amino acid
  Variant (43)..(60): Xaa in position 43 to 60 is any amino acid
  Variant (62)..(67): Xaa in position 62 to 67 is any amino acid
  Variant (68)..(68): Xaa in position 68 is any or no amino acid
  Variant (70)..(73): Xaa in position 70 to 73 is any amino acid
  Variant (74)..(74): Xaa in position 74 is any or no amino acid
  Variant (76)..(84): Xaa in position 76 to 84 is any amino acid
  Variant (86)..(90): Xaa in position 86 to 90 is any amino acid
  Variant (92)..(95): Xaa in position 92 to 95 is any amino acid
  Variant (97)..(101): Xaa in position 97 to 101 is any amino acid
  Variant (105)..(130): Xaa in position 105 to 130 is any amino acid
  Variant (131)..(135): Xaa in position 131 to 135 is any or no amino acid
  Variant (137)..(138): Xaa in position 137 to 138 is any amino acid
  Variant (140)..(153): Xaa in position 140 to 153 is any amino acid
  Variant (155)..(155): Xaa in position 155 is any amino acid
  Variant (158)..(158): Xaa in position 158 is any amino acid
  Variant (160)..(160): Xaa in position 160 is any amino acid
  Variant (166)..(167): Xaa in position 166 to 167 is any amino acid
  Variant (169)..(172): Xaa in position 169 to 172 is any amino acid
  Variant (174)..(175): Xaa in position 174 to 175 is any amino acid
  Variant (177)..(183): Xaa in position 177 to 183 is any amino acid
  Variant (184)..(184): Xaa in position 184 is any or no amino acid
  Variant (186)..(186): Xaa in position 186 is any amino acid
  Variant (190)..(190): Xaa in position 190 is any amino acid
  Variant (192)..(193): Xaa in position 192 to 193 is any amino acid
  Variant (194)..(195): Xaa in position 194 to 195 is any or no amino acid
  Variant (197)..(197): Xaa in position 197 is any amino acid
  Variant (198)..(198): Xaa in position 198 is any or no amino acid
  Variant (200)..(200): Xaa in position 200 is any amino acid
  Variant (202)..(202): Xaa in position 202 is any amino acid
  Variant (216)..(216): Xaa in position 216 is any amino acid
  Variant (219)..(219): Xaa in position 219 is any amino acid
  Variant (221)..(221): Xaa in position 221 is any amino acid
  Variant (229)..(229): Xaa in position 229 is any amino acid
  Variant (231)..(233): Xaa in position 231 to 233 is any amino acid
  Variant (234)..(234): Xaa in position 234 is any or no amino acid
  Variant (236)..(236): Xaa in position 236 is any amino acid
  Variant (239)..(239): Xaa in position 239 is any amino acid
  Variant (247)..(247): Xaa in position 247 is any amino acid
  Variant (249)..(249): Xaa in position 249 is any amino acid
  Variant (252)..(252): Xaa in position 252 is any amino acid
  Variant (254)..(254): Xaa in position 254 is any amino acid
  Variant (257)..(257): Xaa in position 257 is any amino acid
  Variant (259)..(260): Xaa in position 259 to 260 is any amino acid
  Variant (263)..(267): Xaa in position 263 to 267 is any amino acid
  Variant (268)..(268): Xaa in position 268 is any or no amino acid
  Variant (273)..(280): Xaa in position 273 to 280 is any amino acid
  Variant (281)..(281): Xaa in position 281 is any or no amino acid
  Variant (283)..(284): Xaa in position 283 to 284 is any amino acid
  Variant (286)..(288): Xaa in position 286 to 288 is any amino acid
  Variant (294)..(295): Xaa in position 294 to 295 is any amino acid
  Variant (298)..(300): Xaa in position 298 to 300 is any amino acid
  Variant (302)..(302): Xaa in position 302 is any amino acid
  Variant (304)..(316): Xaa in position 304 to 316 is any amino acid
  Variant (317)..(321): Xaa in position 317 to 321 is any or no amino acid
  Variant (323)..(323): Xaa in position 323 is any amino acid
  Variant (325)..(326): Xaa in position 325 to 326 is any amino acid
  Variant (329)..(329): Xaa in position 329 is any amino acid
  Variant (335)..(335): Xaa in position 335 is any amino acid
  Variant (337)..(337): Xaa in position 337 is any amino acid
  Variant (339)..(341): Xaa in position 339 to 341 is any amino acid
  Variant (343)..(344): Xaa in position 343 to 344 is any amino acid
  Variant (348)..(348): Xaa in position 348 is any amino acid
  Variant (351)..(351): Xaa in position 351 is any amino acid
  Variant (353)..(353): Xaa in position 353 is any amino acid
  Variant (355)..(355): Xaa in position 355 is any amino acid
  Variant (360)..(360): Xaa in position 360 is any amino acid
  Variant (362)..(363): Xaa in position 362 to 363 is any amino acid
  Variant (364)..(364): Xaa in position 364 is any or no amino acid
  Variant (367)..(368): Xaa in position 367 to 368 is any amino acid
  Variant (372)..(372): Xaa in position 372 is any amino acid
  Variant (376)..(377): Xaa in position 376 to 377 is any amino acid
  Variant (379)..(382): Xaa in position 379 to 382 is any amino acid
  Variant (384)..(385): Xaa in position 384 to 385 is any amino acid
  Variant (388)..(389): Xaa in position 388 to 389 is any amino acid
  Variant (391)..(402): Xaa in position 391 to 402 is any amino acid
  Variant (409)..(409): Xaa in position 409 is any amino acid
  Variant (411)..(411): Xaa in position 411 is any amino acid
  Variant (412)..(415): Xaa in position 412 to 415 is any or no amino acid
  Variant (417)..(417): Xaa in position 417 is any amino acid
  Variant (418)..(418): Xaa in position 418 is any or no amino acid
  Variant (420)..(424): Xaa in position 420 to 424 is any amino acid
  Variant (427)..(430): Xaa in position 427 to 430 is any amino acid
  Variant (432)..(434): Xaa in position 432 to 434 is any amino acid
  Variant (436)..(447): Xaa in position 436 to 447 is any amino acid
  Variant (448)..(450): Xaa in position 448 to 450 is any or no amino acid
  Variant (452)..(455): Xaa in position 452 to 455 is any amino acid
  Variant (457)..(460): Xaa in position 457 to 460 is any amino acid
  Variant (463)..(466): Xaa in position 463 to 466 is any amino acid
  Variant (467)..(467): Xaa in position 467 is any or no amino acid
  Variant (469)..(469): Xaa in position 469 is any amino acid
  Variant (471)..(485): Xaa in position 471 to 485 is any amino acid
  Variant (486)..(487): Xaa in position 486 to 487 is any or no amino acid
  Variant (489)..(491): Xaa in position 489 to 491 is any amino acid
  Variant (493)..(494): Xaa in position 493 to 494 is any amino acid
  Variant (497)..(508): Xaa in position 497 to 508 is any amino acid
  Variant (509)..(517): Xaa in position 509 to 517 is any or no amino acid
GAXXXXXGXXTGRSPXDKXXVXXXXXXXXXXWXXXXXXXXXNXXXXXXXXXXXXXXXXXXLXXXXXXXVXXXXXGXXXXXXXXXRXXXXXAXXXXFXXXXXIRPXXXXXXXXXXXXXXXXXXXXXXXXXXXXXXXGXXSXXXXXXXXXXXXXXIXGTXYXGEMKKXXFXXXXYXXPXXXXXXXXHXSANXGXXXXGXXDXAXFFGLSGTGKTTLSXDPXRXLIGDDEHXWXXXXGXFNXEGGCYAKXIXLSXEXEPXIXXAIXXXXXXLENVXXXXXXXXXDXXDXXXTENTRXXYPXXXIXNXXXXXXXXXXXXXXXXXXIXLXXDAXGVLPPXSXLXXXQXXYHFXSGXTXKXAGTEXGXXXEPXXTFSXCFGXXFXXXXPXXYAXXLXXXXXXXXXXXXLVNTGWXGXXXXXGXXRXXXXXTRXXXXAXXXGXXXXXXXXXXXXXXXFXXXXPXXXXGVXXXXXLXPXXXXXXXXXXXXXXXXXLXXXFXXNFXXXXXXXXXXXXXXXXXXXXXGP

SEQ ID NO: 1346 - protein, 32 aa, Artificial sequence
  protein pattern
  Variant (2)..(2): Xaa in position 2 is Thr or Val
  Variant (3)..(3): Xaa in position 3 is Ala, Ser or Thr
  Variant (4)..(4): Xaa in position 4 is Ile, Leu or Val
  Variant (18)..(18): Xaa in position 18 is Ala, Ser or Thr
  Variant (20)..(21): Xaa in position 20 to 21 is any amino acid
  Variant (23)..(23): Xaa in position 23 is any amino acid
  Variant (31)..(31): Xaa in position 31 is Cys, Gly or Val
DXXXFFGLSGTGKTTLSXDXXRXLIGDDEHXW

SEQ ID NO: 1347 - protein, 37 aa, Artificial sequence
  protein pattern
  Variant (2)..(3): Xaa in position 2 to 3 is any amino acid
  Variant (4)..(4): Xaa in position 4 is any or no amino acid
  Variant (7)..(7): Xaa in position 7 is any amino acid
  Variant (10)..(10): Xaa in position 10 is Phe, Ile, Leu or Met
  Variant (13)..(13): Xaa in position 13 is Ile or Val
  Variant (14)..(14): Xaa in position 14 is Ala or Ser
  Variant (15)..(15): Xaa in position 15 is any amino acid
  Variant (17)..(19): Xaa in position 17 to 19 is any amino acid
  Variant (21)..(21): Xaa in position 21 is Ala, Thr or Val
  Variant (22)..(22): Xaa in position 22 is any amino acid
  Variant (24)..(24): Xaa in position 24 is His or Tyr
  Variant (26)..(26): Xaa in position 26 is Ile or Leu
  Variant (29)..(29): Xaa in position 29 is Phe or Tyr
  Variant (31)..(31): Xaa in position 31 is Ala or Ser
  Variant (32)..(33): Xaa in position 32 to 33 is any amino acid
  Variant (34)..(34): Xaa in position 34 is Ala or Pro
LXXXDAXGVXPPXXXLXXXQXXYXFXSGXTXXXXGTE

SEQ ID NO: 1348 - protein, 51 aa, Artificial sequence
  protein pattern
  Variant (2)..(2): Xaa in position 2 is any amino acid
  Variant (3)..(4): Xaa in position 3 to 4 is any or no amino acid
  Variant (7)..(7): Xaa in position 7 is any amino acid
  Variant (8)..(8): Xaa in position 8 is Ala or Pro
  Variant (9)..(9): Xaa in position 9 is Ser or Thr
  Variant (12)..(12): Xaa in position 12 is Ala, Ser or Thr
  Variant (15)..(15): Xaa in position 15 is Ala or Gly
  Variant (16)..(16): Xaa in position 16 is Ala, Glu, Gly, Asn, Gln or Ser
  Variant (17)..(17): Xaa in position 17 is Ala or Pro
  Variant (19)..(19): Xaa in position 19 is Phe, Ile, Leu or Met
  Variant (20)..(22): Xaa in position 20 to 22 is any amino acid
  Variant (24)..(25): Xaa in position 24 to 25 is any amino acid
  Variant (27)..(27): Xaa in position 27 is Ala or Gly
  Variant (28)..(29): Xaa in position 28 to 29 is any amino acid
  Variant (31)..(33): Xaa in position 31 to 33 is any amino acid
  Variant (34)..(34): Xaa in position 34 is Ile, Leu or Met
  Variant (35)..(40): Xaa in position 35 to 40 is any amino acid
  Variant (41)..(41): Xaa in position 41 is Ala, Cys, Gly or Val
  Variant (42)..(42): Xaa in position 42 is Phe, Trp or Tyr
  Variant (44)..(44): Xaa in position 44 is Ile, Leu or Val
  Variant (49)..(49): Xaa in position 49 is any amino acid
  Variant (50)..(50): Xaa in position 50 is any or no amino acid
GXXXEPXXXFSXCFXXXFXXXXPXXYXXXLXXXXXXXXXXXXLXNTGWXXG

SEQ ID NO: 1349 - protein, 27 aa, Artificial sequence
  protein pattern
  Variant (2)..(2): Xaa in position 2 is any amino acid
  Variant (5)..(5): Xaa in position 5 is Phe or Ile
  Variant (13)..(13): Xaa in position 13 is Ala, Cys, Thr or Val
  Variant (14)..(14): Xaa in position 14 is Ile, Leu or Val
  Variant (15)..(15): Xaa in position 15 is any amino acid
  Variant (17)..(18): Xaa in position 17 to 18 is any amino acid
  Variant (19)..(20): Xaa in position 19 to 20 is any or no amino acid
  Variant (23)..(23): Xaa in position 23 is any amino acid
  Variant (25)..(25): Xaa in position 25 is Phe, His, Trp or Tyr
  Variant (26)..(26): Xaa in position 26 is any amino acid
  Variant (27)..(27): Xaa in position 27 is Ala, Cys, Ser or Thr
GXFNXEGGCYAKXXXLXXXXEPXIXXX

SEQ ID NO: 1350 - protein, 18 aa, Artificial sequence
  protein pattern
  Variant (2)..(2): Xaa in position 2 is Trp or Tyr
  Variant (3)..(3): Xaa in position 3 is any amino acid
  Variant (4)..(4): Xaa in position 4 is Ala, Asn or Ser
  Variant (5)..(5): Xaa in position 5 is any amino acid
  Variant (7)..(9): Xaa in position 7 to 9 is any amino acid
  Variant (10)..(10): Xaa in position 10 is Leu or Met
  Variant (11)..(11): Xaa in position 11 is any amino acid
  Variant (13)..(13): Xaa in position 13 is any amino acid
  Variant (15)..(17): Xaa in position 15 to 17 is any or no amino acid
AXXXXFXXXXXIXPXXXE

SEQ ID NO: 1351 - protein, 27 aa, Artificial sequence
  protein pattern
  Variant (2)..(3): Xaa in position 2 to 3 is any or no amino acid
  Variant (5)..(7): Xaa in position 5 to 7 is any amino acid
  Variant (8)..(8): Xaa in position 8 is any or no amino acid
  Variant (10)..(10): Xaa in position 10 is Ala, Glu or Gln
  Variant (14)..(14): Xaa in position 14 is Ala, Cys, Ser or Val
  Variant (15)..(15): Xaa in position 15 is Ala or Ser
  Variant (18)..(18): Xaa in position 18 is Ile, Leu, Met or Val
  Variant (19)..(20): Xaa in position 19 to 20 is any amino acid
  Variant (22)..(26): Xaa in position 22 to 26 is any amino acid
  Variant (27)..(27): Xaa in position 27 is Gly, Pro, Ser or Thr
DXXDXXXXTXNTRXXYPXXXIXXXXXX

SEQ ID NO: 1352 - DNA, 1506 bp, Saccharomyces cerevisiae
  CDS (1)..(1506)
atgtcccatcgtatagcaccttccaaagaacgatcttcatcatttatttcaattttagacgatgaaacaagagacacattgaaagctaatgcagtcatggatggtgaagtagatgtcaaaaaaacaaaaggaaaaagctctcggtatatcccaccatggacaactccatatataataggtataggtggtgcttcaggttcaggcaagacaagcgttgctgctaagattgtgtcgtcaattaatgttccctggacagtattaatatctttggataacttttacaatccattaggcccagaggacagagccagagcctttaaaaatgaatacgatttcgacgagccaaatgccatcaacttagatttggcatataagtgcattttgaacttaaaggagggcaaaaggacaaatatcccagtttatagcttcgtccaccacaatagagttcctgataaaaatatagtcatatacggggccagtgtggtagttatcgaagggatctacgccctttacgatcgccgattgctggatttgatggacttgaaaatttatgttgacgctgatttggatgtctgcttagcaagaagattgtcgagagatatagtttccagagggagagatttggatggttgtattcaacaatgggagaaatttgtgaaaccaaatgcggtaaagtttgtgaaaccaacaatgaagaatgcagatgctatcattccatcgatgagtgataatgctacagcggtaaatttaatcattaaccacatcaagtcaaaactggaactaaaatcaaatgaacacttaagagagctaatcaaattgggctcttctccttcacaagatgtgcttaatcgtaacataattcatgaattgccgcccaccaaccaagttctttcgctgcatactatgcttctaaataaaaatctaaattgcgcggactttgttttctactttgacaggttagcaacaattttgttatcatgggcacttgatgacattcctgtagcacatacgaacataattacacctggtgagcataccatggaaaacgttattgcctgtcaattcgatcaagttacagctgttaatattattcgatctggcgattgttttatgaagtctttgagaaagacgatccccaatatcacaattggtaaattgttgattcagtccgattcacaaactggggaacctcaactgcattgcgaatttttacccccaaatatagaaaagtttggcaaggttttcttaatggaaggtcaaatcataagtggtgcggccatgatcatggccatccaggtgcttttagatcatggtattgatttggaaaagattagcgtggtggtttatttggccactgaagttggtatccgacgtatattaaatgcatttgataacaaagtcaacatttttgctggtatgatcatctccagagaaaagttacaaaatcatcaatacaaatgggcattgaccagattttttgattcaaagtattttggttgtgattga

SEQ ID NO: 1353 - protein, 501 aa, Saccharomyces cerevisiae
MSHRIAPSKERSSSFISILDDETRDTLKANAVMDGEVDVKKTKGKSSRYIPPWTTPYIIGIGGASGSGKTSVAAKIVSSINVPWTVLISLDNFYNPLGPEDRARAFKNEYDFDEPNAINLDLAYKCILNLKEGKRTNIPVYSFVHHNRVPDKNIVIYGASVVVIEGIYALYDRRLLDLMDLKIYVDADLDVCLARRLSRDIVSRGRDLDGCIQQWEKFVKPNAVKFVKPTMKNADAIIPSMSDNATAVNLIINHIKSKLELKSNEHLRELIKLGSSPSQDVLNRNIIHELPPTNQVLSLHTMLLNKNLNCADFVFYFDRLATILLSWALDDIPVAHTNIITPGEHTMENVIACQFDQVTAVNIIRSGDCFMKSLRKTIPNITIGKLLIQSDSQTGEPQLHCEFLPPNIEKFGKVFLMEGQIISGAAMIMAIQVLLDHGIDLEKISVVVYLATEVGIRRILNAFDNKVNIFAGMIISREKLQNHQYKWALTRFFDSKYFGCD

SEQ ID NO: 1354 - DNA, 1470 bp, Oryza sativa (japonica cultivar-group)
  CDS (1)..(1470)
atgggttcaagaccagttgatgaggttcttgatgctgccgcggctggggtccactactccacgctccgtttggatgagcttaacatcaatggctccatgacaggggaggaacaaccaacgacctcaggggtggagaatgggcaccaggagccatttgtcattggtgttgccgggggtgcatcttcaggcaaaagtactgtatgcaaaatgataatcgatcagctacgtgatcagcgtgtagttgttgttactcaggagtctttttattatgggttgtctgatgaggaattggtccatgttcatgattataactttgatcatccagatgcatttgatacggagttactactctcttgtatggagaacttgaaacatggcaaggctgtggacattcctaattacaacttcaaaacatataagagtgttgcaagtgcaagaaaggtcaatccttcagatgtaattattttggaaggaattctggttttccatgattcacgtgtccgggatttgatgaacatgaagatctttgttgacacagatgctgatgtgcgattaacaaggaggattcgacgtgacaccattgagaagggtagagatatcaaaactgtgctagatcagtactcaaagtttgttaagcctgcttttgaagacttcatcctcccaaccaagaagtatgctgatattatcatcccacgaggtggcgataatgatgttgcaattgacttaatagttcagcatattcgtactaagcttggtcaacatgatctctgtaaagtacaccccaatttgtatgtcattcagactacttatcagatacgaggtatgcacacaataatacgggatgctgccacaacaacacatgatttcatattctatgctgatcggttgattcgattggttgttgagcatggtcttggtcatcttccattcaaggaaaagcaggtcataactccaactggatcggtttacactggggtagagttctccaaaagattgtgtggtatctcagtgattagaagtggtgagagtatggagaatgcattgcgggcatgctgcaaaggtataaaaattgggaagattcttattcacagggaaggagacaatggcaaacagctaatctatcacaatttaccgaaagatattgcaaacaggcatgtgctgttgttggatcccatactgggaacaggaaattcagctgttcaagctatatctctactcttgaaaaagggtgtacaggaaacaaatattatttttctgaatcttatatcagctccccaaggagtgcatgtggtcagcaagagatttccaagagtgaagatcgtgacatcagaaatcgagtttggtctgaatgatgatttccgcgtcatccctgggatgggtgagtttggggataggtactttgggacagatgattatcagtcatcaacaccattcttttgtgatgagaaaaatcgtgtcaggcttttgtga

SEQ ID NO: 1355 - protein, 489 aa, Oryza sativa (japonica cultivar-group)
MGSRPVDEVLDAAAAGVHYSTLRLDELNINGSMTGEEQPTTSGVENGHQEPFVIGVAGGASSGKSTVCKMIIDQLRDQRVVVVTQESFYYGLSDEELVHVHDYNFDHPDAFDTELLLSCMENLKHGKAVDIPNYNFKTYKSVASARKVNPSDVIILEGILVFHDSRVRDLMNMKIFVDTDADVRLTRRIRRDTIEKGRDIKTVLDQYSKFVKPAFEDFILPTKKYADIIIPRGGDNDVAIDLIVQHIRTKLGQHDLCKVHPNLYVIQTTYQIRGMHTIIRDAATTTHDFIFYADRLIRLVVEHGLGHLPFKEKQVITPTGSVYTGVEFSKRLCGISVIRSGESMENALRACCKGIKIGKILIHREGDNGKQLIYHNLPKDIANRHVLLLDPILGTGNSAVQAISLLLKKGVQETNIIFLNLISAPQGVHVVSKRFPRVKIVTSEIEFGLNDDFRVIPGMGEFGDRYFGTDDYQSSTPFFCDEKNRVRLL

SEQ ID NO: 1356 - DNA, 1476 bp, Oryza sativa (japonica cultivar-group)
  CDS (1)..(1476)
atggacgccgcgatggagtcggcggtggggccgcacttcagcgggctccgcctcgactcgcgccgcctctcctcctcctccctccccacctccccctccgccgcctccagcaacggctgcggcggcaacgacgcccccgccgcggttaacgggttcgcgccgccgccgcccccctccgccgccgcagccgcggaggaggggagcaagcagcccttcgtgatcggtgtgtcgggagggacggcgtcggggaagacgacggtctgcgacatgatcatccagcagctgcacgaccaccgcgtcgtgctcgtcaaccaggattcattctaccgtggtttaactgaggaagaatctgaccgtgtgcaagattacaactttgatcacccagatgcatttgatacagagcaacttttagagtgcatgggacagcttaaaagtgggctatctgtaaatattcctatatatgattttaagaaccaccgtcgatgctctgaaagttttagaaaggttaatgcatcagatgtcatcattttggagggcattttagtttttcatgatcaaagggttcgtgatttgatggatatgaaaatttttgttgacacagatgccgatattagacttgcccggcgtataaggcgtgatacagttgaaagaggtagagatgtcatctcagtgctggagcagtatgggaggtttgtgaagcctgcgttcgatgattttgttcttccttccaaaaaatatgctgatgtgatcataccgcgagggggagataaccatgttgccatagatttaattgtgcaacatattcgtacaaaacttggtcagcatgacttatgcaaaatctacccaaatgtttatgtggttaatacaactttccagatacgtggaatgcatactcttattcgcgaccgggacattgcaactccagatttcgtcttttattcagatcgtctgattcgtctggtagttgagcatggactggggcatttgcctttcacagagaagcagattgttacaccaacagggtctacttacatgggagttgacttttgtaagaagctctgtggtgtgtcaattattcgaagtggagaaagcatggagaatgcattacgtgcttgttgtaaggggattaaaataggcaaaattctaatacatcgggatggggacaatggacaacagctcatataccacaagtttcccttggatattgctgaacgacatgttctactcatggatcctgtgcttggtacaggtaactcggcaaatcaagctatagaacttcttataagtagtggagttcctgaggagcggatcatgtttctcaatctcatctcggctcctgaaggggtccattgtgtctgcaagcgattccctcgtctgaagattgtaacctcagagatcgaaactgggttgaacgaggagtaccgggtgatcccagggttaggagagtatggtgatcgctacttcggtacagactaa

SEQ ID NO: 1357 - protein, 491 aa, Oryza sativa (japonica cultivar-group)
MDAAMESAVGPHFSGLRLDSRRLSSSSLPTSPSAASSNGCGGNDAPAAVNGFAPPPPPSAAAAAEEGSKQPFVIGVSGGTASGKTTVCDMIIQQLHDHRVVLVNQDSFYRGLTEEESDRVQDYNFDHPDAFDTEQLLECMGQLKSGLSVNIPIYDFKNHRRCSESFRKVNASDVIILEGILVFHDQRVRDLMDMKIFVDTDADIRLARRIRRDTVERGRDVISVLEQYGRFVKPAFDDFVLPSKKYADVIIPRGGDNHVAIDLIVQHIRTKLGQHDLCKIYPNVYVVNTTFQIRGMHTLIRDRDIATPDFVFYSDRLIRLVVEHGLGHLPFTEKQIVTPTGSTYMGVDFCKKLCGVSIIRSGESMENALRACCKGIKIGKILIHRDGDNGQQLIYHKFPLDIAERHVLLMDPVLGTGNSANQAIELLISSGVPEERIMFLNLISAPEGVHCVCKRFPRLKIVTSEIETGLNEEYRVIPGLGEYGDRYFGTD

SEQ ID NO: 1358 - DNA, 1452 bp, Arabidopsis thaliana
  CDS (1)..(1452)
atgccagaagattcaacggcgattgactatgtcatggagaaggcatcggggcctcacttctccggtcttcgccttgacggtcttctttcttctccgtcgaaatcctccgtctcttctccttctcacttccgtttgagtaattcttctttttcggctaccgacgatcccgccgctcctcatcagcccttcgttatcggagttactggtggtacagcttctggtaagacgacggtatgtgacatgataatccagcaacttcatgatcatcgcattgttttagttaaccaggattcgttttaccgtggtttgacatctgaagaacttgagcatgtacaagaatacaattttgatcatcctgatgcctttgacactgagcagcttttgcattgcgttgacatactcaagagtgggcaaccctatcaaattccaatttatgacttcaagacccatcaacgtaaagtagatgcttttcgccaggtcaatgcttgtgatgtcatcattttggaagggattctagtttttcatgactcacgagttcgggacctaatgaatatgaagatcttcgttgacacagatgctgatgtgaggcttgctcgcagaatcaggcgtgacacggttgagaggggtagggatgttgactctgtgcttgaacagtatgcaaagtttgtgaagcctgcgtttgatgattttgtgctcccctcaaagaaatatgctgatgtgatcattccacgaggaggtgacaatcacgttgcagttgatttgattgtgcaacatatccacacaaaacttgggcaacatgatctctgcaaaatctacccaaatgtttttgttattgaaacaacatttcagataagaggcatgcacactctcattcgagagaaggacatatcaaaacatgacttcgtgttttactcagatcgcctcattcgtttggttgtggagcatggtcttggccatttgcctttcactgagaaacaagtagttactccgacaggatctgtgtatagcggtgttgatttctgcaagaaactctgtggggtctcagtcattcgaagtggtgaaagcatggaaaacgcattgcgcgcatgttgcaaagggattaagatagggaagattctcatccatcgtgacggagacaatggaatgcagcttatatacgagaagcttccaagtgatatctccgagcgtcatgtcctgctattagatcctgttttaggcacaggtaactctgcaaatcaggcgatagaactactcatacagaaaggagtacctgaagcccacattatattcctcaatcttatctcagcgccagaaggaatccattgcgtctgcaaacggttcccaaagttgaagattgtgacgtcagaaatcgatcagtgtctgaacgaagagttcagggttataccaggcttgggtgagtttggtgatcgctactttggtaccgacgagtag

SEQ ID NO: 1359 - protein, 483 aa, Arabidopsis thaliana
MPEDSTAIDYVMEKASGPHFSGLRLDGLLSSPSKSSVSSPSHFRLSNSSFSATDDPAAPHQPFVIGVTGGTASGKTTVCDMIIQQLHDHRIVLVNQDSFYRGLTSEELEHVQEYNFDHPDAFDTEQLLHCVDILKSGQPYQIPIYDFKTHQRKVDAFRQVNACDVIILEGILVFHDSRVRDLMNMKIFVDTDADVRLARRIRRDTVERGRDVDSVLEQYAKFVKPAFDDFVLPSKKYADVIIPRGGDNHVAVDLIVQHIHTKLGQHDLCKIYPNVFVIETTFQIRGMHTLIREKDISKHDFVFYSDRLIRLVVEHGLGHLPFTEKQVVTPTGSVYSGVDFCKKLCGVSVIRSGESMENALRACCKGIKIGKILIHRDGDNGMQLIYEKLPSDISERHVLLLDPVLGTGNSANQAIELLIQKGVPEAHIIFLNLISAPEGIHCVCKRFPKLKIVTSEIDQCLNEEFRVIPGLGEFGDRYFGTDE

SEQ ID NO: 1360 - DNA, 1398 bp, Arabidopsis thaliana
  CDS (1)..(1398)
atggagaaattatctaatggcgttagagatcactgtttgatcagtgactatgtttctccttcagctcctgctcctcttaaacaacctttcgtgatcggtgttgccggaggaaccgcctccgggaagacgacggtttgcaatatgatcatgtctcagttacatgatcaacgtgttgtccttgttaaccaagattcgttttaccactcgcttactaaggagaaattgaacaaggttcatgaatataacttcgatcatcctgatgcattcaacactgaggttttactttcatgtatggagaagttacgatctggacaaccagtgaacattccgagttacgatttcaaaatccatcagagcattgaatcatcaagtccggttaatcctggtgatgtaatcatcttagagggaatcctagttcttaatgatcctcgagttcgtgatctcatgaacatgaagatctttgtcgatacagatgctgatgtacgactctcgagaagaatacagcgtgacaccgtcgagagaggaagaaacatacagaatgtgcttgaacagtatactaagtttgtgaagccgagcttcgatgaatacattcagccgtcgatgaagtatgctgatataatcattccacgaggaggagataatgatgttgcaattgatctcattgtacaacatattcgtacaaagctgtgccaacacaatctctgtaagatatactcaaacatcttcatcatatcttcaacattccagatcaaaggaatgcatactcttatccgtgatatcaacacaaccaagcatgatttcgtcttctacgctgaccgattgattcgactggtcgtggaacatggacttggtcatcttcctttcacagagaaacagatcacaactccaacagggtcagtgtacactggagtcgacttctgcaagagattgtgcggtgtctcagtgatcagaagtggagaaagcatggaaaacgctctaagagcttgctgcaatgggattaagattggtaaaatcctcattcacagagagaataacgatggtcgtcagttaatatatgagaagttgccaaaagatatctcaagcagacatgtcttcctccttgaccctgttctagcatcaggctactctgcagttaaagctataactttgcttctaagcaagggagttccagaatcacatatcatctttctcaatcttatagcagcacctcaaggcatccacgcgctttgcaagaaattcccgatgctaaagattgtgacatcggaaatcgattcatctctcaatgaggactcacgtgtgattccaggcttgggagaatttgcagaccgttactttgggacaaacaacattaattcaaaagtatcaagcttgtctacaaatctcaagttaagaagctaa

SEQ ID NO: 1361 - protein, 465 aa, Arabidopsis thaliana
MEKLSNGVRDHCLISDYVSPSAPAPLKQPFVIGVAGGTASGKTTVCNMIMSQLHDQRVVLVNQDSFYHSLTKEKLNKVHEYNFDHPDAFNTEVLLSCMEKLRSGQPVNIPSYDFKIHQSIESSSPVNPGDVIILEGILVLNDPRVRDLMNMKIFVDTDADVRLSRRIQRDTVERGRNIQNVLEQYTKFVKPSFDEYIQPSMKYADIIIPRGGDNDVAIDLIVQHIRTKLCQHNLCKIYSNIFIISSTFQIKGMHTLIRDINTTKHDFVFYADRLIRLVVEHGLGHLPFTEKQITTPTGSVYTGVDFCKRLCGVSVIRSGESMENALRACCNGIKIGKILIHRENNDGRQLIYEKLPKDISSRHVFLLDPVLASGYSAVKAITLLLSKGVPESHIIFLNLIAAPQGIHALCKKFPMLKIVTSEIDSSLNEDSRVIPGLGEFADRYFGTNNINSKVSSLSTNLKLRS

SEQ ID NO: 1362 - DNA, 1461 bp, Arabidopsis thaliana
  CDS (1)..(1461)
atgccggaagattcttcttctttagactacgcgatggagaaggcatcagggcctcacttctccggtcttcgcttcgacggccttctctcttcttctccacccaattcctccgtcgtctcttcactccgatcagctgtttcttcttcttctccgtcttcttccgatcccgaagcgcctaagcagcccttcattatcggggtttctggtggtacggcttctggtaagaccacggtctgtgacatgataatccagcaacttcatgaccatcgtgtcgttttagttaatcaggattccttttatcgtggtttgacatctgaggagttgcagcgtgtgcaagagtataactttgatcatcctgatgcgtttgacactgagcagcttttgcattgtgctgagactctcaagagcgggcaaccctatcaagttccaatctatgactttaagactcatcaacgtagatctgatactttccgccaggtcaatgcttctgatgtaataatattggaagggattctagttttccatgactcacgagttcggaatctgatgaatatgaagatctttgttgatacagatgctgatgtaaggcttgctcgcagaattaggcgtgacacagttgagaggggtagggatgtcaattctgtgcttgaacagtatgcaaagtttgtgaagccggcatttgatgacttcgtgctcccttcaaagaaatatgctgacgtgatcattcctcgaggaggtgataatcacgttgcagtcgatttgattacgcaacatatccacacaaaacttgggcagcatgatctctgcaaaatctacccaaatgtttatgttatccagtcaacatttcagataagaggcatgcatacacttattcgggaaaaggacatatcaaagcatgactttgtgttttattcagatagactcattcgtctggtcgtggagcatggtcttggtcatttgccattcactgagaaacaagtagttactccaacaggagctgtatataccggtgttgatttctgcaagaaactttgtggggtctcaattattagaagtggtgaaagcatggaaaatgcattacgcgcttgctgcaaaggaattaaaatagggaagattctcatccaccgtgatggcgataatggaaaacagcttatttatgagaagcttcctcacgacatatctgaacgccatgtcctgcttctagatcctgtcttagccacaggtaactcggctaatcaagccattgaactactcatacagaaaggtgttcctgaagctcacattatattcctcaaccttatatcggcgccggagggaatccactgtgtctgcaaacgttttccagcattgaaaattgtgacgtctgaaatagaccaatgtctgaaccaagaattcagagttataccgggcttaggcgagtttggcgatcgttacttcggcaccgacgaggaagaccagtag

SEQ ID NO: 1363 - protein, 486 aa, Arabidopsis thaliana
MPEDSSSLDYAMEKASGPHFSGLRFDGLLSSSPPNSSVVSSLRSAVSSSSPSSSDPEAPKQPFIIGVSGGTASGKTTVCDMIIQQLHDHRVVLVNQDSFYRGLTSEELQRVQEYNFDHPDAFDTEQLLHCAETLKSGQPYQVPIYDFKTHQRRSDTFRQVNASDVIILEGILVFHDSRVRNLMNMKIFVDTDADVRLARRIRRDTVERGRDVNSVLEQYAKFVKPAFDDFVLPSKKYADVIIPRGGDNHVAVDLITQHIHTKLGQHDLCKIYPNVYVIQSTFQIRGMHTLIREKDISKHDFVFYSDRLIRLVVEHGLGHLPFTEKQVVTPTGAVYTGVDFCKKLCGVSIIRSGESMENALRACCKGIKIGKILIHRDGDNGKQLIYEKLPHDISERHVLLLDPVLATGNSANQAIELLIQKGVPEAHIIFLNLISAPEGIHCVCKRFPALKIVTSEIDQCLNQEFRVIPGLGEFGDRYFGTDEEDQ

SEQ ID NO: 1364 - DNA, 1365 bp, Schizosaccharomyces pombe 972h-
  CDS (1)..(1365)
atgcctgaagcttttgagcgttattcaagcaacccaacttatgaacccccatggcgtaaagtgcgatttattggaattgcaggaccatcgggtagtgggaaaacctcggtggcccaattgattgtaaaggcgttaaatcttccacatgttgttattttatcccttgactcgttttacaaatctttgaatgcagagcagaagaagagagcatttaacaacgactatgactttgattcccccgaagccattgattgggacttgctcttcgtaaaactgctagaacttaaacaaggccgtaaagttgacattcctatatatagcttcaatgagcataatcggcttcctgagaccaacacgttattcggagcaagtatcattattctcgaagggatttttgctttatacgatgaaaagattcgctctctccttgacgtctcggtctttctagatacagattcggacgtgtgtctctctcgtcgactgaatcgcgatatcaactatcgaggaagggacatagttggcgttttggaacaatataataaatttgtcaagccaagttatgagaacttcgttaggcgtcaactatcttacactgatcttatcgttcctcgtggccgggacaataaattggcaattgatatggtgattaattttattcgtagaacactttctatacaaagtgaaactcatgttaagaacattgatagtttacagcaaattgtaccaaccattccccatttacccttaaatttagttcagcttaaaattacgcctgaaatatctgccatcaggactattcttataaacaaaaatacacaccctgatgatttacaattttttttgagcagaattggcaccatgttgatgaatttggcaggtgattcgcttgcatatgaaaagaaaacgattactttgcataacggaaaccagtgggaaggtctacaaatggcaaaagagctttgtggtgtttcagttttgcgatccggcggaactcttgaaacagctttatgtcgtcaatttccaacagtgtgtttgggtaagattttggtgcaaatcaataaagttactcaagaaccaactttacattaccataaattgccccgtggcattgctaccatgaatgttgttttgatggcttcacatttaactacacatgcagatgtcttaatggccacgcaaattttagtggatttcggggtcccagaggaaaacattataattgtggtctatgtttgttactctgaaagtattaaagcgctggcttatattttcccaaaggttaccattgttacagcatttctagaaagtgttgctgaacccgtagtcggtagattggatatcgaaaaagtgtattatggatgctga

SEQ ID NO: 1365 - protein, 454 aa, Schizosaccharomyces pombe 972h-
MPEAFERYSSNPTYEPPWRKVRFIGIAGPSGSGKTSVAQLIVKALNLPHVVILSLDSFYKSLNAEQKKRAFNNDYDFDSPEAIDWDLLFVKLLELKQGRKVDIPIYSFNEHNRLPETNTLFGASIIILEGIFALYDEKIRSLLDVSVFLDTDSDVCLSRRLNRDINYRGRDIVGVLEQYNKFVKPSYENFVRRQLSYTDLIVPRGRDNKLAIDMVINFIRRTLSIQSETHVKNIDSLQQIVPTIPHLPLNLVQLKITPEISAIRTILINKNTHPDDLQFFLSRIGTMLMNLAGDSLAYEKKTITLHNGNQWEGLQMAKELCGVSVLRSGGTLETALCRQFPTVCLGKILVQINKVTQEPTLHYHKLPRGIATMNVVLMASHLTTHADVLMATQILVDFGVPEENIIIVVYVCYSESIKALAYIFPKVTIVTAFLESVAEPVVGRLDIEKVYYGC

SEQ ID NO: 1366 - DNA, 1404 bp, Gibberella zeae PH-1
  CDS (1)..(1404)
atgtccgcctctgcaatccctgaaatgaatggcgggcttgagagtcatgtcacggttcagaagcgagcttactattcacctccttgggccgatgtcagtatcatcggtgttgcgggcagctctggctcgggcaagtcgaccttgtcccaggccatcgtcaagaagctgaacctaccctgggactctttctataagaccttgactcccgagcagtccaaaatggcttttgccaatgaacatgactttgactctcccgacgccatcgactttgatgttctagttgaaaaactaagggacctaaaagctggacggcgtgctgagatccctgtttattcatttgcgaagcatgcgcgactggaccatacgacatccatctactcgccccatgtactggttctagagggtatttttgctttatatgacccccgagtcattgagctacttgatatgggtatatattgtgaagcagatgcggatacatgtctatcacgaagacttgtgcgcgatgtgcgagaacgtggccgagatatcgagggtatcatcaagcagtggttcgggtttgtcaagcccaactttgaaaagtttgtcgagccccagcgcaaggtggccgatttaatcgtgccgagaggtatcgagaacagagtagctcttgacatgatggtccagttcgttgagaagaagctgtttgaaaagtcaagacaccatcgagaggcgctgtctcgactcgaagcagcgagcaaggattctgctctatctgaccgtgttgtggtattgaacgatacccgacaactcaaatttatgaacaccatcctgcaagatatcgacacagatcccgaggatttcatattctactttgacagacttgctagcttgatcatcgaacaggcccttaacaacgcccatttcgaggccaagaagatcattacaccacagggatacgaatacaagggccttgtgccaacaggtgaggtctgcgccgttattgtactccgaggaggatcagcgtttgagccggcgctgcgaaagactattccggactgccgaacaggccgacttctgatccagtccgactactcaacaggagagccggagcttcactacttgcgactgcccgatgatatcgcaagccagcaaagtgtgctgctacttgatacacaaatggctaccggcggtgctgccttgatggcggtgcaagtcttggtcgaccatggcgtacagcaggaccgcattgtcctggcaacatactcggcaggcaaggttggacttcacagattgacgtctgtattcccagaaatcactgtggtggtttgcaatatgcttgactaccaacaggaacgatgggtagagaagaggtatttccgcttcaatattggtggtagagttggtattggaatgactggctga

SEQ ID NO: 1367 - protein, 467 aa, Gibberella zeae PH-1
MSASAIPEMNGGLESHVTVQKRAYYSPPWADVSIIGVAGSSGSGKSTLSQAIVKKLNLPWDSFYKTLTPEQSKMAFANEHDFDSPDAIDFDVLVEKLRDLKAGRRAEIPVYSFAKHARLDHTTSIYSPHVLVLEGIFALYDPRVIELLDMGIYCEADADTCLSRRLVRDVRERGRDIEGIIKQWFGFVKPNFEKFVEPQRKVADLIVPRGIENRVALDMMVQFVEKKLFEKSRHHREALSRLEAASKDSALSDRVVVLNDTRQLKFMNTILQDIDTDPEDFIFYFDRLASLIIEQALNNAHFEAKKIITPQGYEYKGLVPTGEVCAVIVLRGGSAFEPALRKTIPDCRTGRLLIQSDYSTGEPELHYLRLPDDIASQQSVLLLDTQMATGGAALMAVQVLVDHGVQQDRIVLATYSAGKVGLHRLTSVFPEITVVVCNMLDYQQERWVEKRYFRFNIGGRVGIGMTG

SEQ ID NO: 1368 - DNA, 1431 bp, Candida glabrata CBS 138
  CDS (1)..(1431)
atgcatgatatgaccgggaactctactgaggctagacgtagtagtgttcatttgaatgaccaacacaaatatattccgccatggactactccttatatcatcggtgttggtggtacgtctgggtcaggtaagaccagtgtggccaataagattgtctcatctattaatgttccatggactgtgctaatctccttggataatttctataaaccactcaatgaagcagaacgggagcgtgcgtttaataacgagtacgactttgatgaacctaatgcaatcgatttggatttggcatatgactgtattttgagcttgaaagaaggtaagaaaacctctattcccgtctatagttttacccaccataatagagatccacacaagcagatccctatatatggtgccagtgttatcgtcttagaaggtatttatgcattatatgatcaaagattacttgatttgatggatttaaaggtgtatgttgacgctgatttagacatttgtttggctagaagattatcgagagatattgttgcaagaggaagagatttgcaaggctgtttattacaatgggaaagatatgtcaaacccgatgctgtcaagtacgttaagccaacaatggcgaaagctgatgctattataccttcaatgtctgataacacagttgctgtaaagctgctaattaagcacatagaatcaaaactagaactgaaatctgaagagcacatgacagaacttgtcaaattaggccaatctggaactggtccattatcagattataagaatttggaggttcttccacagacaaatcaaattaaggccatacacactattttattggacagaaatgtcgatagggatgagttctccttccaatttgataggattgcaactttgttactagccaatacactcaatgatatccctgttcagaaaccagaaactattatcactccagatggattcagtgtaccaggccaacgtaggtgctgctttgatgaagttacagctatcagcacaattagatcaggcgattgttttatgaaagctgttaaaaaggctttcccagccatggcaattggtaagctattaattcaatctgattccctgacaggtgagccacaactgcactgtgagtttatccccgaggacatctcaaaatacaggaaaatactaataatggattctcagatcattagtggtgctgctatgattatggccgtacaagttcttctagaccacaaagtcgatatagaaaacatccatattttagtatacatggccacagaactaggtattagaagaattataaacgcgtttggcaataggatcaaaattacagcaggtattgtcgtcgagagaaatgaaataaaaaacaagaaggcaagttgggccctaacaagatttgtcgacaacaaatattttggttgctaa

SEQ ID NO: 1369 - protein, 476 aa, Candida glabrata CBS 138
MHDMTGNSTEARRSSVHLNDQHKYIPPWTTPYIIGVGGTSGSGKTSVANKIVSSINVPWTVLISLDNFYKPLNEAERERAFNNEYDFDEPNAIDLDLAYDCILSLKEGKKTSIPVYSFTHHNRDPHKQIPIYGASVIVLEGIYALYDQRLLDLMDLKVYVDADLDICLARRLSRDIVARGRDLQGCLLQWERYVKPDAVKYVKPTMAKADAIIPSMSDNTVAVKLLIKHIESKLELKSEEHMTELVKLGQSGTGPLSDYKNLEVLPQTNQIKAIHTILLDRNVDRDEFSFQFDRIATLLLANTLNDIPVQKPETIITPDGFSVPGQRRCCFDEVTAISTIRSGDCFMKAVKKAFPAMAIGKLLIQSDSLTGEPQLHCEFIPEDISKYRKILIMDSQIISGAAMIMAVQVLLDHKVDIENIHILVYMATELGIRRIINAFGNRIKITAGIVVERNEIKNKKASWALTRFVDNKYFGC

SEQ ID NO: 1370 - DNA, 1380 bp, Kluyveromyces lactis NRRL Y-1140
  CDS (1)..(1380)
atgaactcttctggctatataccaccttggacaacaccgtatgttattggtattggagggagttcaggttctggaaagacgagtgttgctaccaaactcgtgacaagaatcaacactccatggacagtattaatatcgttggacaatttctataaaccgttaaccgtcgaagaacgaaagcaggctttcgaaaataactacgatttcgataaaccggattcaatagatttggatctagcttatcaatgtatcctgtctttgaaagaaggtaagaaggtgaaaatcccaacctattcgttcacagatcatgatagaattccaaataagtttttaaccatctatggtgcgagtgttattgttattgaaggaatttacgcattatatgaccaaagacttcttgatttaatggatttgaaggtttacgtggatgcagatttagatatatgtttagctagaagattgacaagggatatcatctctcgtgggagagacttgcatggttgcataagacaatgggagaagtttgttaaaccaaatgcggataggttcgtgaaaccaaccatgaaggcagcagatgcaatcatcccatccatgtcagataacagcattgcgactgagatgttacttaatcacattcagtctaaattgcagctcaaatcgcagcagcatttagcagaacttcaaaagctcgagtcatacgctgtgtcgattgattctttaaatataattcataagttgagacaaactaatcaggtgaaggctctacagactatattgttagacaaaagcgtttcaagagatgactgggtattctattttgacaggttagcaacaatacttttatcctttgcattggacgatatacctacgaaattgaaaacgactaaagttattacgccgacaggaaaacagttggataatccagtttttgttgactttgaccgtgtcacagctataaatattgttagatctggcgactgtttcatgagatctctaagaaagacaattcctagcgtcgcagttggtaagctacttattcaatccgattccagaacaggggaaccacaattgcacagtttatttattccaccaatgatcgaaaattataaccaagtgctactgatggatgcgcagataatttcaggtgcagcgataatcatggcaatccaagttcttactgaccacaatgttgatctcaagaagattaaggttgtagtttatctagcgacagaaaccggtattagaaggatagttaatgctactaataatcaagttgaaatatacgctggagaaattatttccgatgacaaaatcagaactaatcaatgtaattgggccagaaagcggttcgttgcctcaaattactttgggtgcaagtag

SEQ ID NO: 1371 - protein, 459 aa, Kluyveromyces lactis NRRL Y-1140
MNSSGYIPPWTTPYVIGIGGSSGSGKTSVATKLVTRINTPWTVLISLDNFYKPLTVEERKQAFENNYDFDKPDSIDLDLAYQCILSLKEGKKVKIPTYSFTDHDRIPNKFLTIYGASVIVIEGIYALYDQRLLDLMDLKVYVDADLDICLARRLTRDIISRGRDLHGCIRQWEKFVKPNADRFVKPTMKAADAIIPSMSDNSIATEMLLNHIQSKLQLKSQQHLAELQKLESYAVSIDSLNIIHKLRQTNQVKALQTILLDKSVSRDDWVFYFDRLATILLSFALDDIPTKLKTTKVITPTGKQLDNPVFVDFDRVTAINIVRSGDCFMRSLRKTIPSVAVGKLLIQSDSRTGEPQLHSLFIPPMIENYNQVLLMDAQIISGAAIIMAIQVLTDHNVDLKKIKVVVYLATETGIRRIVNATNNQVEIYAGEIISDDKIRTNQCNWARKRFVASNYFGCK

SEQ ID NO: 1372 - DNA, 1521 bp, Debaryomyces hansenii CBS767
  CDS (1)..(1521)
atgccaaacgaaacaaccaaggcaagaaggtcatcaagaatatcaccatatcatgaagactcatcgtctttttttaacattgcttctgtattagataaacaaaaagatacccaacagataaatacagatctggaaaaatgttcatatattccaccctggacggagccatatattattggtatagctggtaattcaggatccgggaagacttctttatctcaaaagattatacaagaaatcaatcaaccttggacagtcttattatcatttgataatttttataatccgttgagtcaagaagaaagacagaaagcatttagtaatgaatttgattttgatacaccagattcacttgatttagatctattatataatgtggtgaaatctttgaaaagtggtgaaaagactgaaattccaatctattcatttactaagcatgatagaacagacaaaacgactacaatatacggagctaatgttattgtaatagagggaatttatgctttgtatgatcaaagactactcgacttaatggatattaagatctatgtcgatacagatcttgatatttgtcttgccagacgattaacaagagatattttatatagaggaagagacttatctggtgctatgaagcagtgggaaacatttgtgaagccaaatgcagtaaggtatgttaatcctaccatggataatgcgaatttagttattcctagaggtttggacaattctattgcaatcaacttaatgatcaaacacattcaaaagcaattagcgttaaaatcatcattacatttacaaagtttgaagagtttgggtgtgaatgaatttaatattggaaattatggaaaccttaatttgttaccgaataataaccatacaagagggatcaattccgccttattcaatatgtccactgagagatcagattttatattttattttgatagaattgcaattttaattatagagaatgctattgaaacatttgaaaattacaggtcgaagatagtaaataccgcaggcaattaccagtatcaaggattggaccacgttgatgaaatttttgcaattaatattattagatctggggattgttttatgaattctattaagaaaacatttcctgagatatctattggtaaattattgatccaatctgcagcattgacaggagaacctcagttacatttcgagaccttaccaccaaatttggacaagatcgaacataagacgatattgttatttgacgcacaaattataagtggagcagcagcgataatggcaattcaagtattacttgatcataaggtaaggatggaagatatagtattttgcacgtatttgtcaacagaaattggattgaggagaattttaaacgtgtttcctagggttaggattgtgattgggaaattaagtactattgatgacagtactaaatcgtataacccagaaaatttcaaagacaccgattggtgtttcagaaatagattcattgattctctctactttggtacataa

SEQ ID NO: 1373 - protein, 506 aa, Debaryomyces hansenii CBS767
MPNETTKARRSSRISPYHEDSSSFFNIASVLDKQKDTQQINTDLEKCSYIPPWTEPYIIGIAGNSGSGKTSLSQKIIQEINQPWTVLLSFDNFYNPLSQEERQKAFSNEFDFDTPDSLDLDLLYNVVKSLKSGEKTEIPIYSFTKHDRTDKTTTIYGANVIVIEGIYALYDQRLLDLMDIKIYVDTDLDICLARRLTRDILYRGRDLSGAMKQWETFVKPNAVRYVNPTMDNANLVIPRGLDNSIAINLMIKHIQKQLALKSSLHLQSLKSLGVNEFNIGNYGNLNLLPNNNHTRGINSALFNMSTERSDFIFYFDRIAILIIENAIETFENYRSKIVNTAGNYQYQGLDHVDEIFAINIIRSGDCFMNSIKKTFPEISIGKLLIQSAALTGEPQLHFETLPPNLDKIEHKTILLFDAQIISGAAAIMAIQVLLDHKVRMEDIVFCTYLSTEIGLRRILNVFPRVRIVIGKLSTIDDSTKSYNPENFKDTDWCFRNRFIDSLYFGT

SEQ ID NO: 1374 - DNA, 1353 bp, Yarrowia lipolytica CLIB122
  CDS (1)..(1353)
atgaaagccaaacagtacgtcccgccatggaaacagccctacattattgccgtggcggggtcttcgggatcgggaaagacttcggtggctcaactcatcatcaagcagttgaatgtgccttggaccgttcttttgtccatggacaacttctacaagacgctgacacctgaggaatctgctgctgcccatcgaaacgagcacgacttcgacacgcctaccgcatacgataccgacgatctggtcaagtgtcttcgagatatcaaggcaggtcatcgagtcaacattcctacgtactcctttgtcgagcacgctcgaaccgacaaaactgtcagcatttacggcgccaacattgtgatccttgagggaatctatgtgctctatgaccaccccggcttactggatctcatcgacatgaagatctttgtcgacactgatctggatacttgtctggctcgacgactcacgagagatatgcttcatcgaggacgagaaatgtccggtattataaaccagtggcgtaagacggtcaagcccaactttgagcgatacgtgcgacctacaatggccaatgctgatgttctgattcctcgaggacgggacaatgtcgtagcgattgatatggtggcccaacatatcactaaaattcttacagacaagagtgaacgacacttggccgatctgtgctcgttgatcgacgacgacgagctggctgccgaggaagctacctggaacaaacagattcatgaactgaaacagtcgccccagcttatcggcattcacacaattctatgttcagatgataccaagcgagctgatttcgtgttctactttgatagaatcgccactctactggtcgagaatgcactgcagcactccaagtttgaaaacattaacgtcgagactcccacaggaaacacctttgagggagtccgacgtctgggaattgacaatacctgtgctgtagctataatccgagcaggtgagtgtttcgaccgttctgtcaagcgaaccatcccttcagtccgaatgggaaagctgctgatccagagtgacatttctaccggagagcccaaattgcatcatctgaaccttccttcccgcatttcagagcctgacgcctttgttctactatgtgacgctcagctctcgtctggagctgccgctatcatggctaccacagtcctggttgaccacggcgtcaaggaggagaacattgtcttcgtttgctatcttgcatctaaacgaggtcttcagcggtacctcaacgcctatcctaatgtgcatactgtggtcggtaagattctcgacggcagtcatggcagattcatcgacaccaagtactacggtacctag

SEQ ID NO: 1375 - protein, 450 aa, Yarrowia lipolytica CLIB122
MKAKQYVPPWKQPYIIAVAGSSGSGKTSVAQLIIKQLNVPWTVLLSMDNFYKTLTPEESAAAHRNEHDFDTPTAYDTDDLVKCLRDIKAGHRVNIPTYSFVEHARTDKTVSIYGANIVILEGIYVLYDHPGLLDLIDMKIFVDTDLDTCLARRLTRDMLHRGREMSGIINQWRKTVKPNFERYVRPTMANADVLIPRGRDNVVAIDMVAQHITKILTDKSERHLADLCSLIDDDELAAEEATWNKQIHELKQSPQLIGIHTILCSDDTKRADFVFYFDRIATLLVENALQHSKFENINVETPTGNTFEGVRRLGIDNTCAVAIIRAGECFDRSVKRTIPSVRMGKLLIQSDISTGEPKLHHLNLPSRISEPDAFVLLCDAQLSSGAAAIMATTVLVDHGVKEENIVFVCYLASKRGLQRYLNAYPNVHTVVGKILDGSHGRFIDTKYYGT

SEQ ID NO: 1376 - DNA, 1290 bp, Aspergillus nidulans FGSC A4
  CDS (1)..(1290)
atggagtcgatctcgccggtgtattctgctgccactaagtcggacaagcgctactctccgccatgggcggatttgagcattatcggaattgctggcagttccggctctggcaaaacgtctgtggcaatggaaattgtgaagtcactggacttaccctgggttgtcatccttgtaatggattcattctacaagagcttgaacccggagcagcatgccaaggcacatcgcaacgagtttgatttcgacagcccagactcgattgatttcgacgtcttagtgcagtgtcttagagatctcaaacaagggattgtggagcttctagacgtcaaagccgtagagctttctgacggcagccaaatagtcctgcgtgatgtcaaagaaagaggtcgagatattgatggaattatcaagcaatggttcaactatgtgaagccttcgtacaaaaagtttgttgagcctcaaagatcggtctcagatattatcattcctcgaggtatcgaaaataaaaccgcgattggcatggttgtacaacatattcaacgcatgctcgaagaaaagtccgagaggcacagtgcaaccctccaagagctccggcgcattacattcgaagaacagttatcacagaatgttatcatgatgccgcaaacgcctcagtccattgggatgaatactatcctccagaatccggagacggagcaagtcgacttcgtgttctatttcgacaggttggctgctttgctgattgaaaagtacatcctaatatccgactcgagccattcgcacggtatggctgacagcaggtatagggctttagattatacttcgtacgcacccaaagaggttgaaacccctcaacataacatgtacagtgggttgaagcaggaaggcatcgtatcagcggttgctattctgcgaggaggctcatgtctagagaccgctctcaaacggacgattcccgactgtgtcactgggcgcgtgctcattcggactaatgagaccaaagaggagccccaactacattaccttaagttgcccccaggtatcgaacagcattcgaatgtcatgcttcttgattcccagatgtcgagtggaggtgcagctttgatggcagtgcgtgtgttgattgaccatggtgtgccggaagacagaatcatttttgtgacttgcgcagctgttcagtcaggcgtcaagcgattggccgccgtttacccgcatgtcaagctcattgttggacgtattgaagaggagagcgaacctcggtggatggagcacagatactttggatgctaa

SEQ ID NO: 1377 - protein, 429 aa, Aspergillus nidulans FGSC A4
MESISPVYSAATKSDKRYSPPWADLSIIGIAGSSGSGKTSVAMEIVKSLDLPWVVILVMDSFYKSLNPEQHAKAHRNEFDFDSPDSIDFDVLVQCLRDLKQGIVELLDVKAVELSDGSQIVLRDVKERGRDIDGIIKQWFNYVKPSYKKFVEPQRSVSDIIIPRGIENKTAIGMVVQHIQRMLEEKSERHSATLQELRRITFEEQLSQNVIMMPQTPQSIGMNTILQNPETEQVDFVFYFDRLAALLIEKYILISDSSHSHGMADSRYRALDYTSYAPKEVETPQHNMYSGLKQEGIVSAVAILRGGSCLETALKRTIPDCVTGRVLIRTNETKEEPQLHYLKLPPGIEQHSNVMLLDSQMSSGGAALMAVRVLIDHGVPEDRIIFVTCAAVQSGVKRLAAVYPHVKLIVGRIEEESEPRWMEHRYFGC

SEQ ID NO: 1378 - DNA, 1638 bp, Candida albicans SC5314
  CDS (1)..(1638): transl_table=12
atgccactacatccgaaatcaagaagaagatcaagtagaatatccccacttcctgacgaggattcattgtcatttataaactcatcagtagaaaaccttgatcaatcaccatttgaaagtatcgatgatttagttgaagatgtcaacaaatatgacttgaaaagtcccagtgatgagcaacaacaacaacagcaacaagagctgcaaactcaaaatttgaaacacaaaccatcattcacttctacaccgaaagcatcatatatcccaccatggaccgaaccatatatcattggtattgctggtaattcagggtcagggaaaacctcaatctcccaaaaaatcattcaggatatcaatcagccatggacggtattattatcatttgataatttctatcaaccattgaccctggaacaaagtaaacttgcatttgccaataattatgattttgattgtcctgattcattagattttgatttattagtagagaccattggtaatttgaaaaaaggaggtaaaactactatcccagtttattcattcacttcacataatcgtacttcaaaaactaataccatttatggcgccaatgttattattgtggaaggtttatatgctttacatgatcaacaattattggatatgatggatttgaaaatatatgtcgatacagatttggatatttgtttagcaagaagattaactcgagatatattgtatcgtggtcgagatttaggtggagctatgcaacaatgggagaaatttgttaagccaaatgcggttaaattcattaatccaacggtacaaaatgctgatttggtgattcctcgaggattagataattcaattgccataaatttaatgattaaacatatcaagaatcaattagcattaaaatcaagaaatcatttacaacgattgaagaaattaggggtcaatataaaatttgatattgataaattcaatattaaattattacaaaacactaatcaagtcaagggaatcaattcgattttatttgatacgtcaacttcacgtaatgatttcatattttattttaatcgtatgtgtggattattaattgaattagcacaagagtttatgaccaattataccaatgtcgatatcgatactggtaaagggatttatcatggtaaaaaattattacaaaatcaatataatgcagtcaatataattcgtagtggagattgcttcatggcatcaattaaaaaatcattcccagtaatttctattggtaaattattaattcaaagtgattcaactacgggggaacctcaattacattttgaaagattgcctcataaattatctgataaaattatgttatttgattcacaaattattagtggagccggagccattatggcaattcaagtattattagatcatcatgttaaagaacaagatattattttaattacgtatttatctacagaaattggtataagaagaattgttaatgtgttccctaaagtgaaaattgttgttgggaaattatcaagtatggaagattcaaattcgaataacaaagtttggtataataatgaaggatttttggatagtcattggcatttcagaaatagatttatagatagtttatatttcggcacagaataa

SEQ ID NO: 1379 - protein, 545 aa, Candida albicans SC5314
MPLHPKSRRRSSRISPLPDEDSLSFINSSVENLDQSPFESIDDLVEDVNKYDLKSPSDEQQQQQQQESQTQNLKHKPSFTSTPKASYIPPWTEPYIIGIAGNSGSGKTSISQKIIQDINQPWTVLLSFDNFYQPLTSEQSKLAFANNYDFDCPDSLDFDLLVETIGNLKKGGKTTIPVYSFTSHNRTSKTNTIYGANVIIVEGLYALHDQQLLDMMDLKIYVDTDLDICLARRLTRDILYRGRDLGGAMQQWEKFVKPNAVKFINPTVQNADLVIPRGLDNSIAINLMIKHIKNQLALKSRNHLQRLKKLGVNIKFDIDKFNIKLLQNTNQVKGINSILFDTSTSRNDFIFYFNRMCGLLIELAQEFMTNYTNVDIDTGKGIYHGKKLLQNQYNAVNIIRSGDCFMASIKKSFPVISIGKLLIQSDSTTGEPQLHFERLPHKLSDKIMLFDSQIISGAGAIMAIQVLLDHHVKEQDIILITYLSTEIGIRRIVNVFPKVKIVVGKLSSMEDSNSNNKVWYNNEGFLDSHWHFRNRFIDSLYFGTE

SEQ ID NO: 1380 - DNA, 2106 bp, Ustilago maydis 521
  CDS (1)..(2106)
atgcaggccgggaagattgtgcagaggccttcgggcgacgggacacccattcttgagcctgtcactccttcgggaaagcgttcggagggctcgacgcatggcgtactcgctgctgccgctgcagctgctttaaccgcaactgaatctgcacctgtgacgccgctcgtatcttcaacagcatcgctgggatcagcgacgccgaccggaaatgcgacgctctccaacactatcgcagccacacgttccaaaaccatcgttcttgccgatgcgggtcgtgcgccttggtacaactcggtaggagaacccgtaccggcgtatgtggtaggtattgcaggcggatctgctagcggaaagacttcggtagccagagagattctcaagaaattgcctaatgttccgtgggttgctatcgtcagtcaagacgcctactacaagtcgctttcgcccgaagaatccaagctagcatttcaagaacagtatgatttcgaccacccggatgctttcgattacgatattctcaagaaatgcatcagagatttgcgtcaaagcaaggccgtcgagatcccagtgtacagcttcgtacagcatcaaagaacttcggaaacaaactacctctacggcccagccgtcctcatcgttgagggcatttttgttctgcacgatcccgagattcgccagttgctcgacctcaaagtctatgttcaggcggactcggatctgatgctggcgagaaggatcaaaagggacattgttgagagggcaaggtcggtcaactcggtgcttgatcagtacttgcgcttcgtcaagcccgcgtttgacaccttcgtctcggctactgctcggcacgcagacatgattgtacccggttcgcacaacgaggttgccatcgaggtcattagtcagcatatggagaagcagctgcgaaaccgatcaagaaagctgcgcgccgagttttacaagacccccgcaacgcaagttccggcgcccacagccaacgacaagaacgtactagctgtcatgagcccatatgacggtctgggctccccacacgagcgccgtgccagcttgacgcatatgaagcccatattgaatcgcagcgagtcatttggcatgtcgtcatctcagcttgttcgaggtgtttcgagcaattcagcagctgatgggacaggactgcctcccaatgtcatcttgctcgctcagactccgcaattacaatctctgctcactatactgcacgatcgatctacacccaccggcgagttcacctttgcctgcaaacgcgtcggaaccctcgttgtcgagctggcaacaacactgctgccgtatcgagaaaaggagatcgccatccatggtggacgcaaacacattggacacgagctcaacgtcagtagcctatgttcggtctcggtccttcgctctggagctgtgctcgagccttccctgcgccgagcttttcccgctatgtcgctgggaagcctgctcatccagtccaacgaggaagatggcgagccgcatttgtacgatgtatcgctgccctctttcatccgccgacgagagaccgcagaaaagtcgtgggtgtttttgctcgatgcgcagattggaacgggtgctgcggctttcatggcaattcgggtcctgttggaccactcggtgcccgaagagcaaattatctttttgacgctattggccagctcacagggcggtattcatgccctgaaccgagccttcccacgcgtgcgcatcgttgtcgctggtgtcgacccaggactgcaaaagctccgcatcccgtggcagacatcgtcatccaaccacagcaatacaagtaagcacgatcgcggcgagcctatacattacgacgacaatgcacctgtagacgaagacgatctctcgccgggccttaaccatcgcgacaatctgcatttgttagcatcgccaccactgaccagcgttgatggcaaatttgctgctaacagaggagccaggcaccagacgcaaagacagccaagtctgacgcattcgccggcgaaaggcagccgggttgtgtttgccatcactcctggctgcggctcaatcggagatcgtttctggggcaccggatctcgatga

SEQ ID NO: 1381 - protein, 701 aa, Ustilago maydis 521
MQAGKIVQRPSGDGTPILEPVTPSGKRSEGSTHGVLAAAAAAALTATESAPVTPLVSSTASLGSATPTGNATLSNTIAATRSKTIVLADAGRAPWYNSVGEPVPAYVVGIAGGSASGKTSVAREILKKLPNVPWVAIVSQDAYYKSLSPEESKLAFQEQYDFDHPDAFDYDILKKCIRDLRQSKAVEIPVYSFVQHQRTSETNYLYGPAVLIVEGIFVLHDPEIRQLLDLKVYVQADSDLMLARRIKRDIVERARSVNSVLDQYLRFVKPAFDTFVSATARHADMIVPGSHNEVAIEVISQHMEKQLRNRSRKLRAEFYKTPATQVPAPTANDKNVLAVMSPYDGLGSPHERRASLTHMKPILNRSESFGMSSSQLVRGVSSNSAADGTGLPPNVILLAQTPQLQSLLTILHDRSTPTGEFTFACKRVGTLVVELATTLLPYREKEIAIHGGRKHIGHELNVSSLCSVSVLRSGAVLEPSLRRAFPAMSLGSLLIQSNEEDGEPHLYDVSLPSFIRRRETAEKSWVFLLDAQIGTGAAAFMAIRVLLDHSVPEEQIIFLTLLASSQGGIHALNRAFPRVRIVVAGVDPGLQKLRIPWQTSSSNHSNTSKHDRGEPIHYDDNAPVDEDDLSPGLNHRDNLHLLASPPLTSVDGKFAANRGARHQTQRQPSLTHSPAKGSRVVFAITPGCGSIGDRFWGTGSR

SEQ ID NO: 1382 - DNA, 1737 bp, Cryptococcus neoformans var. neoformans B-3501A
  CDS (1)..(1737)
atggaacagccagcagggtatcgcactcccagaccacagaagcactccgtctatgaccccacgcagcctcggagcaaaaaccaggtcctgatatcccacggacgggctccctggtatggccctgatggcaggaatatcgaggcatatgtggtgggtattgccggaggtagtgcgtccggaaagacgtctgtagcacgcgctatcctttcggccctcaactacattcccacggttcttatcttgtcccaggactcgttttacaatgctcattccccagaagaggtcgaactggctttcaaaaatgacttggaccttgaccatcccgacgccattgacatgacgctgttcgctcagtgcatcaaggacctgaagcaaggcaaagctacagagatccccgtctactctttccatcatcatcaacgtatgtcggagaaaaaatatatctacggtgcaagcgtcattattgtggaaggtatcatggcgcttcaatctgcagaattgagggaattgtacgacctcaaggtcttcgtaaactgcgattcagatctcatgctagcaagacgtataaagcgagatgtcaaggagcgagggcgtgatgtggaaggtatcctcgaccagtatttgcggtttgttaagagtagctacgatacttttgtccagccctcatcacgctatgccgatataatcgttcccgggtcttcaaatcaacttgccatcgaacttcttgtctcgcatatcaagcgccagctcgagtctcgttctcttcggttccgtagagtgctagccgatattggtgaaaatcgcggcagcagcactccctcagtggaaaaatttgacaagcagatcgttttgcttgagcaaagtaaccagctgcgtggtatcatgacaatacttcgcgatcgcaccacttgtcgagaggagttcatcttccatatcgatcgtttatcaaccatcatcgtggagaaagcccttacacttattccctgtgagcccaaggttgtgaaaacaccgaataaaaatgtctacaaaggtgtttcccagaccaaaaaccttgtgggggtatccattctccgctctggtcttccattctctcaaggtcttcgtcgagtcatccgtgatgtgcctatcggtggtatactcatccagtccgatcccaagactggcgagccattgttattgaaaagtgatctccctcattgcttgagatcgcggaagacaaatggagatgtcagatgtttgctgttggattcgcagatgggtacgggtgcggctgctatgatggccattcgcgtactccttgaccatggcatttctcagaaccgtatcatattccttacatacctcatctctcgctcagcctcatattctgtcctccgcgcattccctaatattcagatcgttacggcggctattgaccccggtctggacgaggtgaagatttcctacatgccaggaagtctcattattggcgaggcggctggtgagggtgatttcgcgatcaggctagtcgatcagttaggacatgaagaggacgggaagagggataatgtgaaagatctgttgaagacggatgaggagctggctgcggatggtttcaagatgaatatcttgaagggaacagaggaattgaaattttctagaaagcataaaaggacatattcatcaacaggagagaagagggcatgggtcatttccccaggcatgggccatgttggagatcggtattatctcgtttga

SEQ ID NO: 1383 - protein, 578 aa, Cryptococcus neoformans var. neoformans B-3501A
MEQPAGYRTPRPQKHSVYDPTQPRSKNQVLISHGRAPWYGPDGRNIEAYVVGIAGGSASGKTSVARAILSALNYIPTVLILSQDSFYNAHSPEEVELAFKNDLDLDHPDAIDMTLFAQCIKDLKQGKATEIPVYSFHHHQRMSEKKYIYGASVIIVEGIMALQSAELRELYDLKVFVNCDSDLMLARRIKRDVKERGRDVEGILDQYLRFVKSSYDTFVQPSSRYADIIVPGSSNQLAIELLVSHIKRQLESRSLRFRRVLADIGENRGSSTPSVEKFDKQIVLLEQSNQLRGIMTILRDRTTCREEFIFHIDRLSTIIVEKALTLIPCEPKVVKTPNKNVYKGVSQTKNLVGVSILRSGLPFSQGLRRVIRDVPIGGILIQSDPKTGEPLLLKSDLPHCLRSRKTNGDVRCLLLDSQMGTGAAAMMAIRVLLDHGISQNRIIFLTYLISRSASYSVLRAFPNIQIVTAAIDPGLDEVKISYMPGSLIIGEAAGEGDFAIRLVDQLGHEEDGKRDNVKDLLKTDEELAADGFKMNILKGTEELKFSRKHKRTYSSTGEKRAWVISPGMGHVGDRYYLV

SEQ ID NO: 1384 - DNA, 1491 bp, Oryza sativa
  CDS (1)..(1491)
atgccggagaaggcggtggacgacgtcatggactcggcggtgggggcgcacttcagcggactccgcctcgaggcgctccgcctctcctccccctccgccccgtcctccccttcctccgccaaggcggccgcggcggcggccgcccactccaacggcgccgtctacgccaacggcgtcgccgccgacgccgcggagcttgtgtcgccatccgcgctcaggcagcccttcgtcatcggggtttcgggtgggacggcgtcggggaagacgacggtgtgcgacatgatcatccagcagctgcacgaccaccgtgtcgtgctcgtcaaccaggattccttctaccgtgggttaactgctgaagaatctgcacatgcccaagattacaactttgatcaccctgatgcatttgacacagagcagcttctggaatgcatggggcagctaaaacgggcacagcctgtaaatgttcctatatatgattttaagaatcaccgacggtcctctgaaagctttagaaaggtcaatgcatcagatgtcattatattagagggcattttagtcttccatgatcaaagagttcgcaatctgatggacatgaaaatttttgtggacacagatgctgatattaggctagctcgacgaataaggcgtgatacagttgaaagaggtagagatgttagctcggtgcttgagcagtatggcaggtttgtgaagccagcatttgatgattttgttctcccttcgaaaaaatatgccgacgtgatcataccacgaggaggtgataatcatgtggcaattgacctgattgttcaacatattcgtactaagcttggtcagcatgacttgtgcaaaatctatccacatgtttatgtggttcaaacaacattccagatccgaggaatgcatactctgattcgtgacagggacatcactacacctgactttgtcttttattcagatcggttgatccgtttggtagttgagcacggactggggcatttgccatttacagaaaagcagattattactccaacagggtccatttatatgggagttgaattttgcaagaagctctgtggagtgtctattgtccgaagtggtgaaagtatggagaatgcattgcgtgcttgttgtaaaggaataaaaattggcaagattctaatacatcgtgttggagacaatggacagcaacttatataccataaactgcccatggatattgctgaacggcatgttcttcttttggatccagtgcttggtacaggtaactcagcaaatcaagctattgagcttctgataagaaaaggtgttccagaggagcgaatcatatttctcaatcttatctcggctcctgagggaattcagtgcgtctgcaagcgatttccgaggctgaagattgtaacctccgagatcgacaccgggttgagcgaggaatacagggtaatcccagggttgggagagtacggtgaccgctacttcggcacagataattga

SEQ ID NO: 1385 - protein, 496 aa, Oryza sativa
MPEKAVDDVMDSAVGAHFSGLRLEALRLSSPSAPSSPSSAKAAAAAAAHSNGAVYANGVAADAAELVSPSALRQPFVIGVSGGTASGKTTVCDMIIQQLHDHRVVLVNQDSFYRGLTAEESAHAQDYNFDHPDAFDTEQLLECMGQLKRAQPVNVPIYDFKNHRRSSESFRKVNASDVIILEGILVFHDQRVRNLMDMKIFVDTDADIRLARRIRRDTVERGRDVSSVLEQYGRFVKPAFDDFVLPSKKYADVIIPRGGDNHVAIDLIVQHIRTKLGQHDLCKIYPHVYVVQTTFQIRGMHTLIRDRDITTPDFVFYSDRLIRLVVEHGLGHLPFTEKQIITPTGSIYMGVEFCKKLCGVSIVRSGESMENALRACCKGIKIGKILIHRVGDNGQQLIYHKLPMDIAERHVLLLDPVLGTGNSANQAIELLIRKGVPEERIIFLNLISAPEGIQCVCKRFPRLKIVTSEIDTGLSEEYRVIPGLGEYGDRYFGTDN

SEQ ID NO: 1386 - DNA, 1476 bp, Oryza sativa
  CDS (1)..(1476)
atgggttcaacttcaaggccagttgatgatgaagttcttgatgccgccaccggggtacactactctgcgctccgtttggaagagcttaacatgaatggctccgtgtcaggggaggaccaaccgacaacctcgggcgtggagaatgggcaccaggagccatttgtcattggtgtcgctgggggtgcatcttcaggtaaaagtactgtatgcaagatgataattgatcagctacgtgatcagcgtgtggttgttgttactcaggagtccttttattatgggttatctgatgaggaattggtccatgttcatgattataactttgatcatccagatgcatttgatacggagttactactctcttgtatggagaacttgaaacatggcaaggctgtggacattcctaattataacttcaaaacatataagagtgtagcaagcgcaagaaaggtcaatccttcagatgtaattattttggaaggtattctggttttccatgattcacgtgtccgggacttgatgaacatgaagatatttgttgatacagatgctgatgtgcgattaacaaggaggattcgacgtgacaccattgagaagggtagagatatcaaaactgtgctagatcagtattcaaagtttgttaagcctgcttttgaagacttcatcctcccaaccaagaagtatgctgatattatcatcccacgaggtggagataatgatgttgcgattgacttaatcgttcagcatattcgcactaagcttggtcaacatgatctctgtaaagtacaccccaatttgtatgtcattcagactacttatcagatacgaggtatgcacacaataatacgcgatgctgccacaacaacacatgatttcatattctatgccgatcggttgattcgattggttgtcgagcatggtcttggtcatcttccattcaaggaaaaacaggtcataactccaactggttctgtttacactggggtagagttctctaaaagattgtgcggtatctcagtgattagaagtggtgagagtatggagaatgcattgcgggcatgctgtaaaggtataaaaattgggaagattcttattcacagagaaggagacaatggcaaacagctaatctatcacaatgtaccaaaagatatagcaaacaggcatgttctattgttggatcccatactgggaacaggaaattcagctgttcaagctatatccctactcttgaagaagggtgtacaggaaacaaacattatctttctgaatcttatatcagctccccaaggagtgcatgtcgttagcaagagatttccgagagtcaagatcgtgacatcagaaattgactttggtctgaacgatgatttccgcgtcatccctggaatgggtgagtttggagataggtacttcggaacagatgattatcagtcatcaacaccattcttttgcgacgagaaaaatcgtgtcaggcttttgtga

SEQ ID NO: 1387 - protein, 491 aa, Oryza sativa
MGSTSRPVDDEVLDAATGVHYSALRLEELNMNGSVSGEDQPTTSGVENGHQEPFVIGVAGGASSGKSTVCKMIIDQLRDQRVVVVTQESFYYGLSDEELVHVHDYNFDHPDAFDTELLLSCMENLKHGKAVDIPNYNFKTYKSVASARKVNPSDVIILEGILVFHDSRVRDLMNMKIFVDTDADVRLTRRIRRDTIEKGRDIKTVLDQYSKFVKPAFEDFILPTKKYADIIIPRGGDNDVAIDLIVQHIRTKLGQHDLCKVHPNLYVIQTTYQIRGMHTIIRDAATTTHDFIFYADRLIRLVVEHGLGHLPFKEKQVITPTGSVYTGVEFSKRLCGISVIRSGESMENALRACCKGIKIGKILIHREGDNGKQLIYHNVPKDIANRHVLLLDPILGTGNSAVQAISLLLKKGVQETNIIFLNLISAPQGVHVVSKRFPRVKIVTSEIDFGLNDDFRVIPGMGEFGDRYFGTDDYQSSTPFFCDEKNRVRLL

SEQ ID NO: 1388 - DNA, 1452 bp, Brassica napus
  CDS (1)..(1452)
atgcctgaagactctacgtcgattgactacgtcatggagaaggcatcggggcctcacttctccggtcttcgcctcgacggccttctctcttctccgtccaaatccaccaactcttccccttctcccttccgttccggcgttccatctttctcccagatttccgatcccgccgcgcctaatcagcctttcgtcatcggagttactggtggtacagcttctggtaagaccacggtgtgtgacatgattatccagcagcttcatgatcatcgcattgttctagttaaccaggattccttttaccgtggtctgacatctgaagaactggagcgtgcgcaagaatacaacttcgatcatcctgatgcatttgacactgaacagcttttgcattgcatcgatacactcaagagtgggcaaccctatcaaattccaatttacgacttcaagacccatcaacgtaaatcagatgcttttcgccaggtcaatgcttgcgatgtcataattttggaagggattctagtttttcatgactcacgagttcgggatctgatgaatatgaagatcttcgttgacacagatgctgatgtgaggcttgctcgcagaatcagacgtgacactgttgagaggggtagggatgttgattctgtccttgaacagtatgcaaagtttgtgaagcctgcgtttgatgattttgtgctgccttcaaagaaatatgccgatgtgatcattcctcgaggaggtgacaatcacgttgcagttgatttgattgtgcaacatatccacacaaaacttgggcaacatgatctctgcaaaatctacccaaatctttttgttatccaatcgacatttcagataagaggcatgcatacacttattcgagagaaggacatatcaaaacatgactttgtgttttactcagatcgactcattcgtctggttgtagagcatggtcttggccatttgccattcactgagaaacaagtagttactccaacaggatctgtgtatagcggtgttgatttctgcaagaaactttgtggggtctcaatcattcgaagtggtgaaagcatggaaaacgcgttacgtgcatgttgtaaagggatcaaaatagggaagattcttattcatcgtgaaggcgacaacggaatgcagcttatatatgagaagcttccaagtgatatctccgagcgccatgtcctgcttctagatcccgttttaggcacaggtaactgtgcaagtcaggcgatagagctactcatacgtaaaggagtccctgaatctcacataatattcctcaatcttatctcggctccggaaggaatccactgcatctgcaaacggtttccgctgttgaagattgtgacatcggaaatagatcagtgtctgaatgaagactttcgggttataccaggcttgggtgaatatggcgatcgctactttggtactgacgagtaa

SEQ ID NO: 1389 - protein, 483 aa, Brassica napus
MPEDSTSIDYVMEKASGPHFSGLRLDGLLSSPSKSTNSSPSPFRSGVPSFSQISDPAAPNQPFVIGVTGGTASGKTTVCDMIIQQLHDHRIVLVNQDSFYRGLTSEELERAQEYNFDHPDAFDTEQLLHCIDTLKSGQPYQIPIYDFKTHQRKSDAFRQVNACDVIILEGILVFHDSRVRDLMNMKIFVDTDADVRLARRIRRDTVERGRDVDSVLEQYAKFVKPAFDDFVLPSKKYADVIIPRGGDNHVAVDLIVQHIHTKLGQHDLCKIYPNLFVIQSTFQIRGMHTLIREKDISKHDFVFYSDRLIRLVVEHGLGHLPFTEKQVVTPTGSVYSGVDFCKKLCGVSIIRSGESMENALRACCKGIKIGKILIHREGDNGMQLIYEKLPSDISERHVLLLDPVLGTGNCASQAIELLIRKGVPESHIIFLNLISAPEGIHCICKRFPLLKIVTSEIDQCLNEDFRVIPGLGEYGDRYFGTDE

SEQ ID NO: 1390 - DNA, 1452 bp, Linum usitatissimum
  CDS (1)..(1452)
atgccggaggaaaccgactccatcgactatgccatggagaaggcctctggtcctcacttctccggccttcgcatcgacagcctcctttcttcccctcctgcttcttccacttcatctcctgctcatcgttcttctcctaccgctgctggttctgttttcgctgacgccaatgctctcaggcagcccttcgtcattggggtttctggaggtaccgcttcggggaagactacggtgtgtgacatgatcattcagcagctccacgatcaccgtgttgtgcttgtcaatcaggattcattctatcgtggattgacgcctcaagaactagaacgcgttcacgaatacaacttcgatcatccagatgcatttgacactgaccagcttttggactgcgttgaaacacttaagcgtgggcttccttatcaagtccctatatatgacttcaagacccatcagcgttgttcagatagctttaggcaggtgaatgcttctgatgttattatattagagggtatattggttttccatgatcaacgtgttcgcaagcttatgaatatgaagatctttgttgatacagatcccgatgtgaggcttgctcgcagaattcggcgtgacactgttgagaggggtagagatataaactctgttcttgagcagtatgctaaatttgtgaagcctgcttttgatgatttcgtacttccttcgaaaaagtatgccgatgtgatcatacctcgtggaggtgataatcatgttgccattgatttgatagttcagcatatccagacgaagcttggtctacatgacctctgcaaaatatatccaaatgtgtatgttattcaaacaacttttcagattagaggcatgcataccttgattcgagacagggaaatttcaaagcatgattttgttttttactcggatagacttattcggctggttgttgaacatggccttggtcatttgccattcacggagaagcaagttgttacccctaccgggtcagtttatactggcgttgacttctgcaaaaaattatgcggagtttctatcgtacgaagtggagaaagcatggaaaatgcattgcgtgcatgttgcaaagggataaaaattggtaaaattttaatccacagggatggcgacaacggaaagcagcttatatatgagaagcttccaaacgacatttccgaaaggcacgtcctgcttctagatcctgttcttgccactggtaactcggccaaccaagcaatcgatctactcatacagaaaggagttccagaatcccatattatattcttaaacctaatctctgcacccgaaggcatccactgcgtctgcaagagttttccatctcttaaaatcgtgacttctgaaatcgatatagcaataaacgacgaatttcgggttgtacctgggctgggagagttcggtgatcggtactttgggactgatgattga

SEQ ID NO: 1391 - protein, 483 aa, Linum usitatissimum
MPEETDSIDYAMEKASGPHFSGLRIDSLLSSPPASSTSSPAHRSSPTAAGSVFADANALRQPFVIGVSGGTASGKTTVCDMIIQQLHDHRVVLVNQDSFYRGLTPQELERVHEYNFDHPDAFDTDQLLDCVETLKRGLPYQVPIYDFKTHQRCSDSFRQVNASDVIILEGILVFHDQRVRKLMNMKIFVDTDPDVRLARRIRRDTVERGRDINSVLEQYAKFVKPAFDDFVLPSKKYADVIIPRGGDNHVAIDLIVQHIQTKLGLHDLCKIYPNVYVIQTTFQIRGMHTLIRDREISKHDFVFYSDRLIRLVVEHGLGHLPFTEKQVVTPTGSVYTGVDFCKKLCGVSIVRSGESMENALRACCKGIKIGKILIHRDGDNGKQLIYEKLPNDISERHVLLLDPVLATGNSANQAIDLLIQKGVPESHIIFLNLISAPEGIHCVCKSFPSLKIVTSEIDIAINDEFRVVPGLGEFGDRYFGTDD

SEQ ID NO: 1392 - DNA, 1434 bp, Glycine max
  CDS (1)..(1434)
atggatgctaagtcggctgtagaattaatggagtcttccgcagaggttcatttttctggatttcacatggatggttttgagcaaagaaaggctagcatagaacaaccaacaacctcagaaactgacatgtataaacaaccttttgtcataggtgttgctgggggtgcagcatctggcaagacaacagtttgtgatatgattattcagcagcttcatgatcaacgagttgtacttgttaatcaggattctttttacaataacttgacggaggaggaacttacaagagtacaagattacaactttgaccatcctgatgcttttgatactaagcaattactacgtgttatggacaagttgaagcatggcgaagcagtagatattccaaagtatgattttaagagttacaagagtgatgatgttttaagaagggtgaacccttcagatgttataattttggaaggcatccttgttttccatgacccacgtgttcgggagttgatgaatatgaagatatttgttgacacagatgctgatgttcgtttggcaagaaggattaggcgtgacactactgaaaagggtcgggatattggagcagtccttgatcagtattcaaaatttgtgaagccagcttttgatgactttattcttccaacaaagaagtatgctgatataattataccccgtggaggagataatcatgtggccattgatttgattgtacagcatattcgcacaaagcttggtcagcatgacctgtgtaaaatatatcctaatttgtatgtcattcagtcaacttttcagatacggggtatgcataccctgatacgtgatgccaagacaacaaagcatgattttgtattttactctgatcgattgattcgattggttgtggaacatggtttggggcatctgccatttacagaaaagcaagtaatcactcctactggttctgtatacactggtgttgatttttgtaaaaggttgtgtggtgtctctgttatcagaagtggggagagtatggagaatgctttgagagcatgctgtaaaggtatcaagattgggaaaattttaattcacagagaaggtgacaatggtcagcagctaatatatgaaaagttgccaaatgatatctctgataggcatgtgttactgttggaccctatacttggcacagggaattcggctgttcaagcaatttctttactcataaaaaagggtgtacctgagtccaacattatatttcttaatctcatatctgcacctaaaggtgtgcatgtggtatgcaaaagttttccaagaataaagatagtaacatctgagattgagattggtttgaatgaagatttccgtgtcatacctggcatgggcgagtttggagatcggtactttggaacagatgatgatgatgagcaagtggtagtttcttcccagtag

SEQ ID NO: 1393 - protein, 477 aa, Glycine max
MDAKSAVELMESSAEVHFSGFHMDGFEQRKASIEQPTTSETDMYKQPFVIGVAGGAASGKTTVCDMIIQQLHDQRVVLVNQDSFYNNLTEEELTRVQDYNFDHPDAFDTKQLLRVMDKLKHGEAVDIPKYDFKSYKSDDVLRRVNPSDVIILEGILVFHDPRVRELMNMKIFVDTDADVRLARRIRRDTTEKGRDIGAVLDQYSKFVKPAFDDFILPTKKYADIIIPRGGDNHVAIDLIVQHIRTKLGQHDLCKIYPNLYVIQSTFQIRGMHTLIRDAKTTKHDFVFYSDRLIRLVVEHGLGHLPFTEKQVITPTGSVYTGVDFCKRLCGVSVIRSGESMENALRACCKGIKIGKILIHREGDNGQQLIYEKLPNDISDRHVLLLDPILGTGNSAVQAISLLIKKGVPESNIIFLNLISAPKGVHVVCKSFPRIKIVTSEIEIGLNEDFRVIPGMGEFGDRYFGTDDDDEQVVVSSQ

SEQ ID NO: 1394 - DNA, 1437 bp, Glycine max
  CDS (1)..(1437)
atgggtactaaatcggctgttgacttaatggagtctttatctgaggttcatttttctggatttcacattgatggcttagagcaaagaaaggctggcacagagcaaccaaccacttcaacaactgacatgtataaacaaccttttgtgataggtgttgctggtggagcagcatccggtaagacatcagtttgtgatatgattgttcagcagcttcatgatcaacgagtcgtacttgttaatcaggactctttttaccataatttgactcaggaggaacttacaagagtacaagattacaactttgaccatcctgaagcttttgatactgagcaattgctacgtgtcatggacaagttgaagcatagccaagcagtagatattccaaagtatgactttaagggttacaagaatgatgtttttccagcaagacgggtaaacccagcggatgttattattttggaaggtatccttgttttccatgatccacgagtgcgggcattgatgaatatgaagatatttgttgacacagatgctgatgttcgtctggctagaagaattaagcgtgatactgctgacaatgctcgtgaaattggagctgtgcttgatcagtattctaaatttgtgaagccagcttttgatgactttattcttcccaccaagaagtacgctgatatcattataccccgtggaggagataatcatgtggctattgatttgattgtacaacatattcgcacgaagcttggtcagcatgacttgtgtaaaatatatcctaatttatatgtcattcagtctacttttcagatacggggtatgcatactctgatacgtgattctcaaacaacgaaacatgactttgtattttattctgaccgtttgattcgtttggttgtagaacatggcctagggcatcttccatttacagaaaagcaagtaatcactccaactggatcggtatacagtggcgtggatttctgtaagaggttgtgtggtgtctccatcatccggagtggggagagtatggaaaatgctttacgagcatgctgcaaaggtatcaagattgggaaaattcttattcatagagaaggtgacaatggtcaacagctaatatatgagaagttgcctaatgacatctcagataggcatgtattactgctggatcccatcttaggcacaggtaattcagctgttcaagcaatttctttgcttttaaagaagggtgtaccagagtccaacattatatttctcaatctcgtatcagcacctcaaggtgttcatgtggtctgtaaaagatttccaagaataaaaatcctgacatctgagattgagattggtttgaatgaagatttccgtgtcatacctggcatgggtgagtttggggaccggtactttggaacagataatgatgaccagcaggtggtacccccttcacagtag

SEQ ID NO: 1395 - protein, 478 aa, Glycine max
MGTKSAVDLMESLSEVHFSGFHIDGLEQRKAGTEQPTTSTTDMYKQPFVIGVAGGAASGKTSVCDMIVQQLHDQRVVLVNQDSFYHNLTQEELTRVQDYNFDHPEAFDTEQLLRVMDKLKHSQAVDIPKYDFKGYKNDVFPARRVNPADVIILEGILVFHDPRVRALMNMKIFVDTDADVRLARRIKRDTADNAREIGAVLDQYSKFVKPAFDDFILPTKKYADIIIPRGGDNHVAIDLIVQHIRTKLGQHDLCKIYPNLYVIQSTFQIRGMHTLIRDSQTTKHDFVFYSDRLIRLVVEHGLGHLPFTEKQVITPTGSVYSGVDFCKRLCGVSIIRSGESMENALRACCKGIKIGKILIHREGDNGQQLIYEKLPNDISDRHVLLLDPILGTGNSAVQAISLLLKKGVPESNIIFLNLVSAPQGVHVVCKRFPRIKILTSEIEIGLNEDFRVIPGMGEFGDRYFGTDNDDQQVVPPSQ

SEQ ID NO: 1396 - DNA, 1434 bp, Glycine max
  CDS (1)..(1434)
atggatgctaagtcggctgtagaattaatggagtcttccgcagaggttcatttttctggatttcacatggatggttttgagcaaagaaaggctagcatagaacaaccaacaacctcagaaactgacatgtataaacaaccttttgtcataggtgttgctgggggtgcagcatctggcaagacaacagtttgtgatatgattattcagcagcttcatgatcaacgagttgtacttgttaatcaggattctttttacaataacttgacggaggaggaacttacaagagtacaagattacaactttgaccatcctgatgcttttgatactaagcaattactacgtgttatggacaagttgaagcatggcgaagcagtagatattccaaagtatgattttaagagttacaagagtgatgatgttttaagaagggtgaacccttcagatgttataattttggaaggcatccttgttttccatgatccacgtgttcgggagttgatgaatatgaagatatttgttgacacagatgctgatgttcgtttggcaagaaggattaggcgtgacactactgagaagggtcgggatattggagcagttcttgatcagtattcaaaatttgtgaagccagcttttgatgactttattcttccaacaaagaagtatgctgatataattataccccgtggaggagataatcatgtggccattgatttgattgtacagcatattcgcacaaagcttggtcagcatgacctgtgtaaaatatatcctaatttgtatgtcattcagtcaacttttcagatacggggtatgcataccctgatacgtgatgccaagacaacaaagcatgattttatattttactctgatcgtttgattcgattggttgtggaacatggtttggggcatctgccatttacagaaaagcaagtaatcactcctactggttctgtatacactggtgttgatttttgtaaaaggttgtgtggtgtctctgttatcagaagtggggagagtatggagaatgctttgagagcatgctgtaaaggtatcaagattgggaaaattttaattcacagagaaggtgacaatggtcagcagctaatatatgaaaagttgccaaatgatatctctgataggcatgtgttactgttggaccctatacttggcacagggaattcggctgttcaagcaatttctttactcataaaaaagggtgtacctgagtccaacattatatttcttaatctcatatctgcacctaaaggtgtgcatgtggtatgcaaaagttttccaagaataaagatagtaacatctgagattgagattggtttgaatgaagatttccgtgtcatacctggcatgggcgagtttggagatcggtactttggaacagatgatgatgatgagcaagtggtagtttcttcccagtag

SEQ ID NO: 1397 - protein, 477 aa, Glycine max
MDAKSAVELMESSAEVHFSGFHMDGFEQRKASIEQPTTSETDMYKQPFVIGVAGGAASGKTTVCDMIIQQLHDQRVVLVNQDSFYNNLTEEELTRVQDYNFDHPDAFDTKQLLRVMDKLKHGEAVDIPKYDFKSYKSDDVLRRVNPSDVIILEGILVFHDPRVRELMNMKIFVDTDADVRLARRIRRDTTEKGRDIGAVLDQYSKFVKPAFDDFILPTKKYADIIIPRGGDNHVAIDLIVQHIRTKLGQHDLCKIYPNLYVIQSTFQIRGMHTLIRDAKTTKHDFIFYSDRLIRLVVEHGLGHLPFTEKQVITPTGSVYTGVDFCKRLCGVSVIRSGESMENALRACCKGIKIGKILIHREGDNGQQLIYEKLPNDISDRHVLLLDPILGTGNSAVQAISLLIKKGVPESNIIFLNLISAPKGVHVVCKSFPRIKIVTSEIEIGLNEDFRVIPGMGEFGDRYFGTDDDDEQVVVSSQ

SEQ ID NO: 1398 - DNA, 1473 bp, Zea mays
  CDS (1)..(1473)
atgccggacaaggcggtggacgacgtcatggaggccgcggtgggggcccacttcagcggcctccgcctcgaggcgctgcgcctctccacctctgcgccctcttccccttcctcctcccccgccgccgcggcgcacacgcactccaacggagccgtctacgccaacggcaccaccgagcttccctctcctgccgctgcccggcagccattcgtcatcggggtttctggagggacggcgtcggggaagacgacggtgtgcgacatgatcatccagcagctgcacgaccaccgtgtcgtgctcgttaaccaggattcgttttaccgtggccttactgctgaagagtctgcacatgcacaagactataattttgatcaccctgatgcatttgatacagagcaacttctagaatgcatggggcagctgaaatgtgctcaacctgtaaatgttcctatatatgatttcaagaagcatcgacggtgttctgaaagctttagaaaggtcaatgcatcagatgtcattattttggagggcattttagtgttccatgaccagagagttcgcaatctgatggacatgaaaatttttgtagacacagatgctgacattaggcttgctcgacgaatcagacgtgatacagttgaaagaggaagagatatcagctccgtgcttgaccaatatgggaggtttgtgaagccagcgttcgatgattttgttttgccttcaaagaagtatgctgacgtgatcattcctcgaggtggtgataaccatgtagcagttgatctgattgttcaacatatccgtacaaaacttggtcagcatgacttgtgcaaaatctatccaaatgttcatgttgttcaatcaacttttcagatccgaggaatgcatactcttatccgtgatagggacatcaccacacctgactttgcattttattcagatcgattgatccgtttggtagtggagcatggtcttggacatttgccatttacagaaaagcaggttattaccccaacaggatctgtttatatgggagttgacttttgtaagaagctctgtggagtctctattgtgcgaagtggtgagagtatggagaacgcattgcgtgcttgttgtaaaggaataaaaattgggaaaattctaattcatcgtgttggagacaatggacaacagcttgtttatcacaaactgcccatggatattgctgaacgacatgttctacttttggatccggtgcttggtacaggcaactcagtagcccaagcaattgaccttcttataagaaaaggtgttcctgaggatcggatcatttttctcaatctcatctcggctcctgaagggattcagtgtatctgcaagcgatttccttcgctgaagattgttacatctgaaatcgattatggtctgaacgaggaattcagggtgatcccaggactgggagaatatggcgaccgctacttcggcacagacaattga

SEQ ID NO: 1399 - protein, 490 aa, Zea mays
MPDKAVDDVMEAAVGAHFSGLRLEALRLSTSAPSSPSSSPAAAAHTHSNGAVYANGTTELPSPAAARQPFVIGVSGGTASGKTTVCDMIIQQLHDHRVVLVNQDSFYRGLTAEESAHAQDYNFDHPDAFDTEQLLECMGQLKCAQPVNVPIYDFKKHRRCSESFRKVNASDVIILEGILVFHDQRVRNLMDMKIFVDTDADIRLARRIRRDTVERGRDISSVLDQYGRFVKPAFDDFVLPSKKYADVIIPRGGDNHVAVDLIVQHIRTKLGQHDLCKIYPNVHVVQSTFQIRGMHTLIRDRDITTPDFAFYSDRLIRLVVEHGLGHLPFTEKQVITPTGSVYMGVDFCKKLCGVSIVRSGESMENALRACCKGIKIGKILIHRVGDNGQQLVYHKLPMDIAERHVLLLDPVLGTGNSVAQAIDLLIRKGVPEDRIIFLNLISAPEGIQCICKRFPSLKIVTSEIDYGLNEEFRVIPGLGEYGDRYFGTDN

SEQ ID NO: 1400 - DNA, 1467 bp, Zea mays
  CDS (1)..(1467)
atgggttcgaaatcggtagatgaggtgctcgatgccgccgccggagtccattgctctgctctccgtctggacggtcccaacgtccagttttccgcctcctccgaggaagaaccaacgacgggtggcctggagaatggccatcaggagccctttgttattggcgttgctgggggtgcatcgtcaggcaaaagtaccgtgtgcaagatgatcattgatcagctccgtgaccagcgcgttgtggctgttacacaggagtccttttattatggattgacggatgaagaattagtccatgttcatgattataattttgatcatccagatgcatttcatacagagctacttctctcttgtatgcaaaacttgaaacatggcaaagctgtcgacatccctaattacaacttcaagacatacaagagtgtaccaaatgcaaggaaggttaatccttcagatgttattattttggaaggaattctagtttttcatgattcacgcctcagggatttgatgaacatgaagatcttcgttgatacagatgccgacgtacggttaacaaggaggatccgtcgtgataccattgacaagggtagagatatcaaagctgtgttagatcagtactcaaaatttgttaagcctgcttttgaagacttcatcctcccaacgaagaagtatgctgatattatcatcccacgaggtggagacaatgatgtggcaattgacctaattgttcaacatattcggactaaacttggacagcatgatctttgcaaaatacaccccaatttgtatgtaattcagactacttatcagatacgaggcatgcacacaataataagggatgctgccacagcaacacatgatttcatattttatgctgatcggttgattcgactggttgtggaacatggtcttggtcatcttccttttcaggaaaagcaggtcatcactccgactggatctgtttacactggtgtggagttctccaaaaggttgtgtggtgtctcagtgatcaggagtggcgaaagcatggagaatgcgttacgagcatgctgtaaaggtataaagattgggaagattcttattcatcgggaaggagacaatggacaacagctcatctatcaaaatttaccaaaagatattgcaaataggcatgttcttctgttggaccccatattgggaacaggaaattcagcagttcaggccatctcccttctattgaagaagggtgtacaagaagcaaatattatattccttaatcttatttcagcgccccaaggagtgcatgtggtgagcaagagattccctagagtgaagatcgttacttcggagattgagtttggtctaaatgatgatttccgtgttgtgcctgggatgggcgaatttggagacagatactttggaacagatgattatcagtcatcgacgccattcttttgtgacgataaaaatcgtgtcaggctcttgtga

SEQ ID NO: 1401 - protein, 488 aa, Zea mays
MGSKSVDEVLDAAAGVHCSALRLDGPNVQFSASSEEEPTTGGLENGHQEPFVIGVAGGASSGKSTVCKMIIDQLRDQRVVAVTQESFYYGLTDEELVHVHDYNFDHPDAFHTELLLSCMQNLKHGKAVDIPNYNFKTYKSVPNARKVNPSDVIILEGILVFHDSRLRDLMNMKIFVDTDADVRLTRRIRRDTIDKGRDIKAVLDQYSKFVKPAFEDFILPTKKYADIIIPRGGDNDVAIDLIVQHIRTKLGQHDLCKIHPNLYVIQTTYQIRGMHTIIRDAATATHDFIFYADRLIRLVVEHGLGHLPFQEKQVITPTGSVYTGVEFSKRLCGVSVIRSGESMENALRACCKGIKIGKILIHREGDNGQQLIYQNLPKDIANRHVLLLDPILGTGNSAVQAISLLLKKGVQEANIIFLNLISAPQGVHVVSKRFPRVKIVTSEIEFGLNDDFRVVPGMGEFGDRYFGTDDYQSSTPFFCDDKNRVRLL

SEQ ID NO: 1402 - DNA, 1440 bp, Zea mays
  CDS (1)..(1440)
atggaggacgcgttgggctccgcggtgggtccccacttcagcggcctccgtctcgactcgcgccgcctctccctctccccttcctcctccccctcccgctccgccagcggcaacggcacgctcgtcgccgcgccggggctcgcgttccccaaggcggaggacgggaccaggaagcccttcgtcataggcgtgtgtggaggcaccgcgtcgggcaagacgacggtgtgcgacgcgatcattcagcagctccacgaccaccgcgtcgcgctcgtcaaccaggattcattctaccatggtttaactgaggaacagtctgagcatgtgcaagactataattttgatcatcctgatgcattcgatacagatcgacttttggagtgcatgggaaagctaacaagtggacagtccgtgaatattcctatatacgattttaagaatcacaggcgatgctctgaaaaatttaggaaggtcaatgaatcagatgtcatcattttggaggggatcttggtttttcatgatcagagggttcgtgatttgatggacatgaaaatttttgttgacgcagacgctgatactagacttgctagacgtgtgaggcgtgatactgttgaaagaggtagagatgttacctcagtgcttgagcagtatgtgagatttgtcaagcctgcatttgatgcttttgtcctgccttcgaagaaatatgctgatgtgatcataccaagagggggagataaccttgttgcaattgatctaattgtgcaacatatcaacacaaaacttggccagcataacttgtgcaaagcctacccaaatgtctttgtagttcacacaactttccagataagaggaatgcatactctaattcgtgacaagaacattactacacctgactttgttttctactcagataggctgattcgtctggtggttgagcatggtcttgggcatttgccatttacagagaagcaggtggttacaccaacaggatctctttacatgggagttgacttctgcaagaagctctgtggagtgtctattattcgaagtggagaaagcatggaaaatgcactgcgtgcttgttgtaaggggataaaaataggcaaaattctatttcatcgcattggagacaatggacaacaactcatataccataagctgcccgtggatattgctgaacgccatgttttgcttttggaccctgtgcttggtacaggtaattcagctaatcaagccattgagcttcttatgagcaaaggagttcctgaggaccgtatcatttttctgactctcgtctcggcccctgaaggcatccattgtgtgtgcaagcgcttccctcatttgaagattgtaacctcagagattgatagtggattgaacgatgaatatcgtgtcataccaggacttggagagtatggtgatcgatacttcggcacagactaa

SEQ ID NO: 1403 - protein, 479 aa, Zea mays
MEDALGSAVGPHFSGLRLDSRRLSLSPSSSPSRSASGNGTLVAAPGLAFPKAEDGTRKPFVIGVCGGTASGKTTVCDAIIQQLHDHRVALVNQDSFYHGLTEEQSEHVQDYNFDHPDAFDTDRLLECMGKLTSGQSVNIPIYDFKNHRRCSEKFRKVNESDVIILEGILVFHDQRVRDLMDMKIFVDADADTRLARRVRRDTVERGRDVTSVLEQYVRFVKPAFDAFVLPSKKYADVIIPRGGDNLVAIDLIVQHINTKLGQHNLCKAYPNVFVVHTTFQIRGMHTLIRDKNITTPDFVFYSDRLIRLVVEHGLGHLPFTEKQVVTPTGSLYMGVDFCKKLCGVSIIRSGESMENALRACCKGIKIGKILFHRIGDNGQQLIYHKLPVDIAERHVLLLDPVLGTGNSANQAIELLMSKGVPEDRIIFLTLVSAPEGIHCVCKRFPHLKIVTSEIDSGLNDEYRVIPGLGEYGDRYFGTD

SEQ ID NO: 1404 - DNA, 1473 bp, Zea mays
  CDS (1)..(1473)
atgccggacaaggcggtggacgacgtcatggaggccgcggtgggggcccacttcagcggcctccgcctcgaggcgctgcgcctctccacctctgcgccctcttccccttcctcctcccccgccgccgcggcgcacacgcactccaacggagccgtctacgccaacggcaccaccgagcttccctctcctgccgctgcccggcagccattcgtcatcggggtttctggagggacggcgtcggggaagacgacggtgtgcgacatgatcatccagcagctgcacgaccaccgtgtcgtgctcgttaaccaggattcgttttaccgtggccttactgctgaagagtctgcacatgcacaagactataattttgatcaccctgatgcatttgatacagagcaacttctagaatgcatggggcagctgaaatgtgctcaacctgtaaatgttcctatatatgatttcaagaagcatcgacggtgttctgaaagctttagaaaggtcaatgcatcagatgtcattattttggagggcattttagtgttccatgaccagagagttcgcaatctgatggacatgaaaatttttgtagacacagatgctgacattaggcttgctcgacgaatcagacgtgatacagttgaaagaggaagagatatcagctccgtgcttgaccaatatgggaggtttgtgaagccagcgttcgatgattttgttttgccttcaaagaagtatgctgacgtgatcattcctcgaggtggtgataaccatgtagcagttgatctgattgttcaacatatccgtacaaaacttggtcagcatgacttgtgcaaaatctatccaaatgttcatgttgttcaatcaacttttcagatccgaggaatgcatactcttatccgtgatagggacatcaccacacctgactttgtattttattcagatcgattgatccgtttggtagtggagcatggtcttggacatttgccatttacagaaaagcaggttattaccccaacaggatctgtttatatgggagttgacttttgtaagaagctctgtggagtctctattgtgcgaagtggtgagagtatggagaacgcattgcgtgcttgttgtaaaggaataaaaattgggaaaattctaattcatcgtgttggagacaatggacaacagcttgtttatcacaaactgcccatggatattgctgaacgacatgttctacttttggatccggtgcttggtacaggcaactcagtagcccaagcaattgaccttcttataagaaaaggtgttcctgaggatcggatcatttttctcaatctcatctcggctcctgaagggattcagtgtatctgcaagcgatttccttcgctgaagattgttacatctgaaatcgattatggtctgaacgaggaattcagggtgatcccaggactgggagaatatggcgaccgctacttcggcacagacaattga

SEQ ID NO: 1405 - protein, 490 aa, Zea mays
MPDKAVDDVMEAAVGAHFSGLRLEALRLSTSAPSSPSSSPAAAAHTHSNGAVYANGTTELPSPAAARQPFVIGVSGGTASGKTTVCDMIIQQLHDHRVVLVNQDSFYRGLTAEESAHAQDYNFDHPDAFDTEQLLECMGQLKCAQPVNVPIYDFKKHRRCSESFRKVNASDVIILEGILVFHDQRVRNLMDMKIFVDTDADIRLARRIRRDTVERGRDISSVLDQYGRFVKPAFDDFVLPSKKYADVIIPRGGDNHVAVDLIVQHIRTKLGQHDLCKIYPNVHVVQSTFQIRGMHTLIRDRDITTPDFVFYSDRLIRLVVEHGLGHLPFTEKQVITPTGSVYMGVDFCKKLCGVSIVRSGESMENALRACCKGIKIGKILIHRVGDNGQQLVYHKLPMDIAERHVLLLDPVLGTGNSVAQAIDLLIRKGVPEDRIIFLNLISAPEGIQCICKRFPSLKIVTSEIDYGLNEEFRVIPGLGEYGDRYFGTDN

SEQ ID NO: 1406 - DNA, 1443 bp, Zea mays
  CDS (1)..(1443)
atgggttcgaaatcggtagacgaggtgctcgacgccgccgccgccggagtccattactccgcactccgtctggacggccaggcttccgcaacgacgtctggcctggagaacggccaccaggagccctttgtcattggtgttgctgggggtgcatcgtcaggcaagagtaccgtgtgcaagatgatcattgatcagctccgtgaccagcgtgtcgtggttgttacgcaggagtccttttattatggattgacggatgaagaattagtacatgtccataattataactttgatcatccagacgcatttcatacagagctacttctctcttgtatgcaaaacttgaaatgtggcaaagctgttgacatccctaactacaacttcaagacatacaaaagtgtcccaaatgcaaggaaggttaatccttcggatgttattattttggaaggaattctagtttttcatgattcacgcctcagggatttgatgaacatgaagattttcgttgatacagacgctgacgtacggttaacaaggaggatccatcgtgataccattgacaagggtagagatctcaaagctgtgttagaacagttctcaaaatttgttaagcctgcttttgaagacttcatcctcccaacgaagaagtatgctgatgttatcatcccacgcggaggagacaatgatgtggcaattgacctaatcgttcagcatattcggactaaacttggacaacatgatcttcgtaaaatacaccctaatctgtatgtaattcagactacttatcagatacgaggcatgcacacaataataagggatgctgccacagcaacacatgatttcatattttatgctgatcggttgattcgattggttgtcgaacatggtcttggtcatcttcctttccaggaaaagcaggtcatcactccgactgggtctgtttacactggtgtggagttctccaaaaggttgtgtggtatctcagtgatcaggagtggcgaaagtatggagaatgcactacgtgcatgctgtaaaggtataaagattgggaagattcttattcatcgggaaggtgacaatggacaacagctcatctatcaaaatttaccaaaagatattgcaaataggcatgttcttctgttggaccccatattgggaacaggaaattcagcagttcaggccatctcccttctattgaagaagggtgtacaggaagcaaatattatatttcttaatcttatttcagcgccccaaggagtgcatgtggtgggcaagagattccctagagtgaagatcgttacttcggagattgagtttggtctaaatgatgatttccgtgtcgtacctgggatgggcgaatttggagacagatactttggaacagatgaatatcagtcatcgacgccatttttttgtgacgataaaaatcgtgtcaggctcttgtga

SEQ ID NO: 1407 - protein, 480 aa, Zea mays
MGSKSVDEVLDAAAAGVHYSALRLDGQASATTSGLENGHQEPFVIGVAGGASSGKSTVCKMIIDQLRDQRVVVVTQESFYYGLTDEELVHVHNYNFDHPDAFHTELLLSCMQNLKCGKAVDIPNYNFKTYKSVPNARKVNPSDVIILEGILVFHDSRLRDLMNMKIFVDTDADVRLTRRIHRDTIDKGRDLKAVLEQFSKFVKPAFEDFILPTKKYADVIIPRGGDNDVAIDLIVQHIRTKLGQHDLRKIHPNLYVIQTTYQIRGMHTIIRDAATATHDFIFYADRLIRLVVEHGLGHLPFQEKQVITPTGSVYTGVEFSKRLCGISVIRSGESMENALRACCKGIKIGKILIHREGDNGQQLIYQNLPKDIANRHVLLLDPILGTGNSAVQAISLLLKKGVQEANIIFLNLISAPQGVHVVGKRFPRVKIVTSEIEFGLNDDFRVVPGMGEFGDRYFGTDEYQSSTPFFCDDKNRVRLL

SEQ ID NO: 1408 - DNA, 1443 bp, Zea mays
  CDS (1)..(1443)
atgggttcgaaatcggtagacgaggtgctcgacgccgccgccgccggagtccattactccgcactccgtctggacggccaggcttccgcaacgacgtctggcctggagaacggccaccaggagccctttgtcattggtgttgctgggggtgcatcgtcaggcaagagtaccgtgtgcaagatgatcattgatcagctccgtgaccagcgtgtcgtggttgttacgcaggagtccttttattatggattgacggatgaagaattagtacatgtccataattataactttgatcatccagacgcatttcatacagagctacttctctcttgtatgcaaaacttgaaatgtggcaaagctgttgacatccctaactacaacttcaagacatacaaaagtgtcccaaatgcaaggaaggttaatccttcggatgttattattttggaaggaattctagtttttcatgattcacgcctcagggatttgatgaacatgaagattttcgttgatacagacgctgacgtacggttaacaaggaggatccatcgtgataccattgacaagggtagagatctcaaagctgtgttagaacagttctcaaaatttgttaagcctgcttttgaagacttcatcctcccaacgaagaagtatgctgatgttatcatcccacgcggaggagacaatgatgtggcaattgacctaatcgttcagcatattcggactaaacttggacaacatgatcttcgtaaaatacaccctaatctgtatgtaattcagactacttatcagatacgaggcatgcacacaataataagggatgctgccacagcaacacatgatttcatattttatgctgatcggttgattcgattggttgtcgaacatggtcttggtcatcttcctttccaggaaaagcaggtcatcactccgactgggtctgtttacactggtgtggagttctccaaaaggttgtgtggtatctcagtgatcaggagtggcgaaagtatggagaatgcactacgtgcatgctgtaaaggtataaagattgggaagattcttattcatcgggaaggtgacaatggacaacagctcatctatcaaaatttaccaaaagatattgcaaataggcatgttctgctgttggaccccatattgggaacaggaaattcagcagttcaggccatctcccttctattgaagaagggtgtacaagaagcaaatattatatttcttaatcttatttcagcgccccaaggagtgcatgtggtgagcaagagattccctagagtgaagatcgttacttcggagattgagtttggtctaaatgatgatttccgtgttgtgcctgggatgggcgaatttggagacagatactttggaacagatgattatcagtcatcgacgccattcttttgtgacgataaaaatcgtgtcaggctcttgtga

SEQ ID NO: 1409 - protein, 480 aa, Zea mays
MGSKSVDEVLDAAAAGVHYSALRLDGQASATTSGLENGHQEPFVIGVAGGASSGKSTVCKMIIDQLRDQRVVVVTQESFYYGLTDEELVHVHNYNFDHPDAFHTELLLSCMQNLKCGKAVDIPNYNFKTYKSVPNARKVNPSDVIILEGILVFHDSRLRDLMNMKIFVDTDADVRLTRRIHRDTIDKGRDLKAVLEQFSKFVKPAFEDFILPTKKYADVIIPRGGDNDVAIDLIVQHIRTKLGQHDLRKIHPNLYVIQTTYQIRGMHTIIRDAATATHDFIFYADRLIRLVVEHGLGHLPFQEKQVITPTGSVYTGVEFSKRLCGISVIRSGESMENALRACCKGIKIGKILIHREGDNGQQLIYQNLPKDIANRHVLLLDPILGTGNSAVQAISLLLKKGVQEANIIFLNLISAPQGVHVVSKRFPRVKIVTSEIEFGLNDDFRVVPGMGEFGDRYFGTDDYQSSTPFFCDDKNRVRLL

SEQ ID NO: 1410 - DNA, 1473 bp, Zea mays
  CDS (1)..(1473)
atgccggacaaggcggtggacgacgtcatggaggccgcggtgggggcccacttcagcggcctccgcctcggggcgctgcgcctctccacctctgcgccctcttccccttcctcctcccccgccgccgcggcgcacacgcactccaacggagccgtctacgccaacggcaccaccgagcttccctctcctgccgctgcccggcagccattcgtcatcggggtttctggagggacggcgtcggggaagacgacggtgtgcgacatgatcatccagcagctgcacgaccaccgtgtcgtgctcgttaaccaggattcgttttaccgtggccttactgctgaagagtctgcacatgcacaagactataattttgatcaccctgatgcatttgatacagagcaacttctagaatgcatggggcagctgaaatgtgctcaacctgtaaatgttcctatatatgatttcaagaagcatcgacggtgttctgaaagctttagaaaggtcaatgcatcagatgtcattattttggagggcattttagtgttccatgaccagagagttcgcaatctgatggacatgaaaatttttgtagacacagatgctgacattaggcttgctcgacgaatcagacgtgatacagttgaaagaggaagagatatcagctccgtgcttgaccaatatgggaggtttgtgaagccagcgttcgatgattttgttttgccttcaaagaagtatgctgacgtgatcattcctcgaggtggtgataaccatgtagcagttgatctgattgttcaacatatccgtacaaaacttggtcagcatgacttgtgcaaaatctatccaaatgttcatgttgttcaatcaacttttcagatccgaggaatgcatactcttatccgtgatagggacatcaccacacctgactttgtattttattcagatcgattgatccgtttggtagtggagcatggtcttggacatttgccatttacagaaaagcaggttattaccccaacaggatctgtttatatgggagttgacttttgtaagaagctctgtggagtctctattgtgcgaagtggtgagagtatggagaacgcattgcgtgcttgttgtaaaggaataaaaattgggaaaattctaattcatcgtgttggagacaatggacaacagcttgtttatcacaaactgcccatggatattgctgaacgacatgttctacttttggatccggtgcttggtacaggcaactcagtagcccaagcaattgaccttcttataagaaaaggtgttcctgaggatcggatcatttttctcaatctcatctcggctcctgaagggattcagtgtatctgcaagcgatttccttcgctgaagattgttacatctgaaatcgattatggtctgaacgaggaattcagggtgatcccaggactgggagaatatggcgaccgctacttcggcacagacaattga

SEQ ID NO: 1411 - protein, 490 aa, Zea mays
MPDKAVDDVMEAAVGAHFSGLRLGALRLSTSAPSSPSSSPAAAAHTHSNGAVYANGTTELPSPAAARQPFVIGVSGGTASGKTTVCDMIIQQLHDHRVVLVNQDSFYRGLTAEESAHAQDYNFDHPDAFDTEQLLECMGQLKCAQPVNVPIYDFKKHRRCSESFRKVNASDVIILEGILVFHDQRVRNLMDMKIFVDTDADIRLARRIRRDTVERGRDISSVLDQYGRFVKPAFDDFVLPSKKYADVIIPRGGDNHVAVDLIVQHIRTKLGQHDLCKIYPNVHVVQSTFQIRGMHTLIRDRDITTPDFVFYSDRLIRLVVEHGLGHLPFTEKQVITPTGSVYMGVDFCKKLCGVSIVRSGESMENALRACCKGIKIGKILIHRVGDNGQQLVYHKLPMDIAERHVLLLDPVLGTGNSVAQAIDLLIRKGVPEDRIIFLNLISAPEGIQCICKRFPSLKIVTSEIDYGLNEEFRVIPGLGEYGDRYFGTDN

SEQ ID NO: 1412 - DNA, 23 bp, Artificial sequence
  primer
atgtcccatcgtatagcaccttc

SEQ ID NO: 1413 - DNA, 27 bp, Artificial sequence
  primer
tcaatcacaaccaaaatactttgaatc

SEQ ID NO: 1414 - protein, 619 aa, Artificial sequence
  consensus sequence
  Variant (2)..(3): Xaa in position 2 to 3 is any amino acid
  Variant (6)..(7): Xaa in position 6 to 7 is any amino acid
  Variant (9)..(11): Xaa in position 9 to 11 is any amino acid
  Variant (16)..(16): Xaa in position 16 is any amino acid
  Variant (18)..(20): Xaa in position 18 to 20 is any amino acid
  Variant (22)..(24): Xaa in position 22 to 24 is any amino acid
  Variant (26)..(29): Xaa in position 26 to 29 is any amino acid
  Variant (30)..(31): Xaa in position 30 to 31 is any or no amino acid
  Variant (33)..(36): Xaa in position 33 to 36 is any amino acid
  Variant (38)..(38): Xaa in position 38 is any amino acid
  Variant (41)..(42): Xaa in position 41 to 42 is any amino acid
  Variant (44)..(45): Xaa in position 44 to 45 is any amino acid
  Variant (47)..(53): Xaa in position 47 to 53 is any amino acid
  Variant (54)..(55): Xaa in position 54 to 55 is any or no amino acid
  Variant (57)..(57): Xaa in position 57 is any amino acid
  Variant (60)..(60): Xaa in position 60 is any amino acid
  Variant (64)..(64): Xaa in position 64 is any amino acid
  Variant (66)..(68): Xaa in position 66 to 68 is any amino acid
  Variant (70)..(75): Xaa in position 70 to 75 is any amino acid
  Variant (78)..(78): Xaa in position 78 is any amino acid
  Variant (80)..(84): Xaa in position 80 to 84 is any amino acid
  Variant (86)..(86): Xaa in position 86 is any amino acid
  Variant (88)..(88): Xaa in position 88 is any amino acid
  Variant (90)..(105): Xaa in position 90 to 105 is any amino acid
  Variant (106)..(106): Xaa in position 106 is any or no amino acid
  Variant (110)..(110): Xaa in position 110 is any amino acid
  Variant (114)..(117): Xaa in position 114 to 117 is any amino acid
  Variant (119)..(119): Xaa in position 119 is any amino acid
  Variant (121)..(123): Xaa in position 121 to 123 is any amino acid
  Variant (124)..(124): Xaa in position 124 is any or no amino acid
  Variant (127)..(128): Xaa in position 127 to 128 is any amino acid
  Variant (131)..(131): Xaa in position 131 is any amino acid
  Variant (134)..(134): Xaa in position 134 is any amino acid
  Variant (136)..(136): Xaa in position 136 is any amino acid
  Variant (138)..(139): Xaa in position 138 to 139 is any amino acid
  Variant (141)..(141): Xaa in position 141 is any amino acid
  Variant (144)..(145): Xaa in position 144 to 145 is any amino acid
  Variant (148)..(151): Xaa in position 148 to 151 is any amino acid
  Variant (155)..(160): Xaa in position 155 to 160 is any amino acid
  Variant (162)..(164): Xaa in position 162 to 164 is any amino acid
  Variant (169)..(172): Xaa in position 169 to 172 is any amino acid
  Variant (174)..(175): Xaa in position 174 to 175 is any amino acid
  Variant (177)..(180): Xaa in position 177 to 180 is any amino acid
  Variant (183)..(183): Xaa in position 183 is any amino acid
  Variant (189)..(189): Xaa in position 189 is any amino acid
  Variant (192)..(193): Xaa in position 192 to 193 is any amino acid
  Variant (195)..(196): Xaa in position 195 to 196 is any amino acid
  Variant (198)..(200): Xaa in position 198 to 200 is any amino acid
  Variant (203)..(205): Xaa in position 203 to 205 is any amino acid
  Variant (207)..(210): Xaa in position 207 to 210 is any amino acid
  Variant (211)..(235): Xaa in position 211 to 235 is any or no amino acid
  Variant (237)..(248): Xaa in position 237 to 248 is any amino acid
  Variant (249)..(299): Xaa in position 249 to 299 is any or no amino acid
  Variant (301)..(301): Xaa in position 301 is any amino acid
  Variant (303)..(304): Xaa in position 303 to 304 is any amino acid
  Variant (306)..(307): Xaa in position 306 to 307 is any amino acid
  Variant (309)..(318): Xaa in position 309 to 318 is any amino acid
  Variant (321)..(321): Xaa in position 321 is any amino acid
  Variant (324)..(324): Xaa in position 324 is any amino acid
  Variant (328)..(329): Xaa in position 328 to 329 is any amino acid
  Variant (331)..(332): Xaa in position 331 to 332 is any amino acid
  Variant (334)..(335): Xaa in position 334 to 335 is any amino acid
  Variant (336)..(354): Xaa in position 336 to 354 is any or no amino acid
  Variant (356)..(358): Xaa in position 356 to 358 is any amino acid
  Variant (360)..(361): Xaa in position 360 to 361 is any amino acid
  Variant (362)..(364): Xaa in position 362 to 364 is any or no amino acid
  Variant (366)..(368): Xaa in position 366 to 368 is any amino acid
  Variant (371)..(371): Xaa in position 371 is any amino acid
  Variant (373)..(376): Xaa in position 373 to 376 is any amino acid
  Variant (378)..(390): Xaa in position 378 to 390 is any amino acid
  Variant (391)..(392): Xaa in position 391 to 392 is any or no amino acid
  Variant (396)..(401): Xaa in position 396 to 401 is any amino acid
  Variant (404)..(410): Xaa in position 404 to 410 is any amino acid
  Variant (414)..(414): Xaa in position 414 is any amino acid
  Variant (417)..(422): Xaa in position 417 to 422 is any amino acid
  Variant (424)..(424): Xaa in position 424 is any amino acid
  Variant (425)..(425): Xaa in position 425 is any or no amino acid
  Variant (428)..(431): Xaa in position 428 to 431 is any amino acid
  Variant (434)..(435): Xaa in position 434 to 435 is any amino acid
  Variant (437)..(439): Xaa in position 437 to 439 is any amino acid
  Variant (440)..(446): Xaa in position 440 to 446 is any or no amino acid
  Variant (450)..(450): Xaa in position 450 is any amino acid
  Variant (452)..(456): Xaa in position 452 to 456 is any amino acid
  Variant (458)..(462): Xaa in position 458 to 462 is any amino acid
  Variant (465)..(466): Xaa in position 465 to 466 is any amino acid
  Variant (468)..(470): Xaa in position 468 to 470 is any amino acid
  Variant (473)..(473): Xaa in position 473 is any amino acid
  Variant (475)..(476): Xaa in position 475 to 476 is any amino acid
  Variant (478)..(478): Xaa in position 478 is any amino acid
  Variant (480)..(487): Xaa in position 480 to 487 is any amino acid
  Variant (488)..(488): Xaa in position 488 is any or no amino acid
  Variant (490)..(496): Xaa in position 490 to 496 is any amino acid
  Variant (499)..(501): Xaa in position 499 to 501 is any amino acid
  Variant (502)..(502): Xaa in position 502 is any or no amino acid
  Variant (505)..(507): Xaa in position 505 to 507 is any amino acid
  Variant (509)..(520): Xaa in position 509 to 520 is any amino acid
  Variant (521)..(616): Xaa in position 521 to 616 is any or no amino acid
PXXIGXXGXXXSGKTXVXXXIXXXLXXXXXXVXXXXDXFYXXLXXEXXXXXXXXXYXFDXPDAXDXXXLXXXXXXLKXGXXXXXPXYXFXXXXXXXXXXXXXXXXXVIIXEGIXXXXDXRXXXXLMXXKIXVDXDXDXXLXRRXXRDXXXXGRDXXXXXXQXXXFVKPXXXXFXXPXXXXADXIIPRGXDNXXAXXLXXXHIXXXLXXXXXXXXXXXXXXXXXXXXXXXXXXXXXLXXXXXXXXXXXXXXXXXXXXXXXXXXXXXXXXXXXXXXXXXXXXXXXXXXXXXXXXXXXXXXXTXQXXGXXTXXXXXXXXXXDFXFYXDRLXXLXXEXXXXXXXXXXXXXXXXXXXXXLXXXPXXXXXKXXXTPXGXXXXGXXXXXXXXXXXXXXXRSGXXXXXXLRXXXXXXXIGKXLIXXXXXXGXXQLXXXXLPXXIXXXXXXXXXXVLLXDXXXXXGXXXXXAIXXLXXXGVXEXXIXFXXXXXXXXXGXXXXXXXFPXXXXIVXXXIXXXXXXXXXXXXXXXXXXXXXXXXXXXXXXXXXXXXXXXXXXXXXXXXXXXXXXXXXXXXXXXXXXXXXXXXXXXXXXXXXXXXXXXXXXXXXXXXXXXXXXXXXXXXYFG

SEQ ID NO: 1415 - protein, 58 aa, Artificial sequence
  protein pattern
  Variant (2)..(2): Xaa in position 2 is Phe or Tyr
  Variant (3)..(3): Xaa in position 3 is Cys or Val
  Variant (4)..(4): Xaa in position 4 is Asp or Glu
  Variant (5)..(5): Xaa in position 5 is Ala or Thr
  Variant (7)..(7): Xaa in position 7 is Ala, Leu or Pro
  Variant (9)..(10): Xaa in position 9 to 10 is any amino acid
  Variant (12)..(12): Xaa in position 12 is Ala, Ser or Thr
  Variant (15)..(15): Xaa in position 15 is any amino acid
  Variant (16)..(16): Xaa in position 16 is any or no amino acid
  Variant (18)..(18): Xaa in position 18 is any or no amino acid
  Variant (20)..(23): Xaa in position 20 to 23 is any amino acid
  Variant (24)..(24): Xaa in position 24 is Ala or Gly
  Variant (26)..(26): Xaa in position 26 is Asp, Glu or Asn
  Variant (27)..(27): Xaa in position 27 is Ile, Leu, Met or Val
  Variant (28)..(28): Xaa in position 28 is any amino acid
  Variant (29)..(29): Xaa in position 29 is Ala, Gly, Asn, Ser or Thr
  Variant (30)..(30): Xaa in position 30 is any amino acid
  Variant (31)..(31): Xaa in position 31 is Ile, Leu or Met
  Variant (32)..(32): Xaa in position 32 is any amino acid
  Variant (34)..(34): Xaa in position 34 is Phe, Trp or Tyr
  Variant (35)..(37): Xaa in position 35 to 37 is any amino acid
  Variant (41)..(41): Xaa in position 41 is Ala, Asn or Ser
  Variant (42)..(44): Xaa in position 42 to 44 is any amino acid
  Variant (45)..(45): Xaa in position 45 is Phe or Tyr
  Variant (46)..(46): Xaa in position 46 is Ile or Val
  Variant (47)..(47): Xaa in position 47 is any amino acid
  Variant (49)..(49): Xaa in position 49 is Gln, Ser or Thr
  Variant (50)..(52): Xaa in position 50 to 52 is any amino acid
  Variant (54)..(55): Xaa in position 54 to 55 is any amino acid
  Variant (56)..(56): Xaa in position 56 is any or no amino acid
  Variant (58)..(58): Xaa in position 58 is Ile, Pro or Val
IXXXXDXDXXLXRRXXRXDXXXXXRXXXXXXXQXXXXVKPXXXXXXXPXXXXAXXXIX

SEQ ID NO: 1416 - protein, 23 aa, Artificial sequence
  protein pattern
  Variant (2)..(2): Xaa in position 2 is Ala or Gly
  Variant (3)..(3): Xaa in position 3 is Ile or Val
  Variant (4)..(4): Xaa in position 4 is Ala, Cys, Gly, Ser or Thr
  Variant (6)..(6): Xaa in position 6 is Ala, Gly, Pro, Ser or Thr
  Variant (7)..(7): Xaa in position 7 is Ala, Ser or Thr
  Variant (8)..(8): Xaa in position 8 is Ala, Gly or Ser
  Variant (12)..(12): Xaa in position 12 is any or no amino acid
  Variant (14)..(14): Xaa in position 14 is any or no amino acid
  Variant (16)..(16): Xaa in position 16 is Ala or Cys
  Variant (17)..(18): Xaa in position 17 to 18 is any amino acid
  Variant (20)..(20): Xaa in position 20 is Ile, Met or Val
  Variant (21)..(21): Xaa in position 21 is any amino acid
  Variant (22)..(22): Xaa in position 22 is Ala, Gln or Ser
  Variant (23)..(23): Xaa in position 23 is Ile or Leu
IXXXGXXXSGKXTXVXXXIXXXX

SEQ ID NO: 1417 - protein, 31 aa, Artificial sequence
  protein pattern
  Variant (2)..(2): Xaa in position 2 is Ile, Leu or Met
  Variant (3)..(3): Xaa in position 3 is Ile or Leu
  Variant (4)..(4): Xaa in position 4 is any amino acid
  Variant (5)..(5): Xaa in position 5 is Asp, Glu, Asn or Ser
  Variant (6)..(11): Xaa in position 6 to 11 is any amino acid
  Variant (13)..(14): Xaa in position 13 to 14 is any or no amino acid
  Variant (16)..(16): Xaa in position 16 is any amino acid
  Variant (18)..(19): Xaa in position 18 to 19 is any or no amino acid
  Variant (22)..(22): Xaa in position 22 is Ile or Leu
  Variant (23)..(23): Xaa in position 23 is Ala or Ile
  Variant (24)..(24): Xaa in position 24 is any amino acid
  Variant (25)..(25): Xaa in position 25 is Ile or Leu
  Variant (26)..(27): Xaa in position 26 to 27 is Ile, Leu or Val
  Variant (28)..(28): Xaa in position 28 is Glu or Ser
  Variant (29)..(30): Xaa in position 29 to 30 is any amino acid
  Variant (31)..(31): Xaa in position 31 is Ile or Leu
TXXXXXXXXXXDXXFXFXXDRXXXXXXXXXX

SEQ ID NO: 1418 - protein, 38 aa, Artificial sequence
  protein pattern
  Variant (3)..(3): Xaa in position 3 is any amino acid
  Variant (5)..(5): Xaa in position 5 is Asp, Glu or Asn
  Variant (7)..(10): Xaa in position 7 to 10 is any amino acid
  Variant (11)..(11): Xaa in position 11 is any or no amino acid
  Variant (13)..(18): Xaa in position 13 to 18 is any amino acid
  Variant (19)..(19): Xaa in position 19 is any or no amino acid
  Variant (21)..(22): Xaa in position 21 to 22 is any amino acid
  Variant (23)..(23): Xaa in position 23 is Ala, Gly or Ser
  Variant (24)..(26): Xaa in position 24 to 26 is any amino acid
  Variant (27)..(27): Xaa in position 27 is Asp, Glu, Asn, Gln or Ser
  Variant (28)..(28): Xaa in position 28 is Ile or Val
  Variant (30)..(30): Xaa in position 30 is any amino acid
  Variant (32)..(32): Xaa in position 32 is Asp, Asn or Ser
  Variant (34)..(35): Xaa in position 34 to 35 is any amino acid
  Variant (36)..(36): Xaa in position 36 is His or Tyr
  Variant (37)..(37): Xaa in position 37 is any amino acid
  Variant (38)..(38): Xaa in position 38 is Asn, Arg or Ser
FDXPXAXXXXXLXXXXXXXLXXXXXXXXPXYXFXXXXX

SEQ ID NO: 1419 - protein, 25 aa, Artificial sequence
  protein pattern
  Variant (2)..(2): Xaa in position 2 is any amino acid
  Variant (3)..(8): Xaa in position 3 to 8 is any or no amino acid
  Variant (11)..(11): Xaa in position 11 is Ile or Leu
  Variant (13)..(13): Xaa in position 13 is Phe or Ile
  Variant (14)..(14): Xaa in position 14 is any amino acid
  Variant (15)..(15): Xaa in position 15 is Arg or Ser
  Variant (16)..(16): Xaa in position 16 is any amino acid
  Variant (17)..(17): Xaa in position 17 is Ala, Gly, Asn or Ser
  Variant (18)..(18): Xaa in position 18 is any amino acid
  Variant (19)..(19): Xaa in position 19 is Asp, Asn or Thr
  Variant (21)..(21): Xaa in position 21 is any amino acid
  Variant (22)..(22): Xaa in position 22 is Pro or Gln
  Variant (23)..(23): Xaa in position 23 is any amino acid
  Variant (24)..(24): Xaa in position 24 is Ile, Leu or Val
  Variant (25)..(25): Xaa in position 25 is His or Tyr
KXXXXXXXGKXLXXXXXXXGXXXXX

SEQ ID NO: 1420 - protein, 16 aa, Artificial sequence
  protein pattern
  Variant (2)..(2): Xaa in position 2 is Ile, Leu or Val
  Variant (3)..(3): Xaa in position 3 is Ile or Val
  Variant (4)..(4): Xaa in position 4 is Ile or Leu
  Variant (8)..(9): Xaa in position 8 to 9 is any or no amino acid
  Variant (11)..(11): Xaa in position 11 is any amino acid
  Variant (12)..(13): Xaa in position 12 to 13 is any or no amino acid
  Variant (15)..(15): Xaa in position 15 is any amino acid
VXXXEGIXXLXXXDXR

SEQ ID NO: 1421 - protein, 22 aa, Artificial sequence
  protein pattern
  Variant (3)..(4): Xaa in position 3 to 4 is any amino acid
  Variant (6)..(7): Xaa in position 6 to 7 is any amino acid
  Variant (8)..(8): Xaa in position 8 is Leu or Met
  Variant (9)..(9): Xaa in position 9 is Ile, Leu, Met or Val
  Variant (10)..(11): Xaa in position 10 to 11 is any amino acid
  Variant (14)..(14): Xaa in position 14 is any amino acid
  Variant (15)..(15): Xaa in position 15 is any or no amino acid
  Variant (17)..(17): Xaa in position 17 is any or no amino acid
  Variant (19)..(20): Xaa in position 19 to 20 is any amino acid
  Variant (21)..(21): Xaa in position 21 is His or Lys
  Variant (22)..(22): Xaa in position 22 is Asp, Asn or Ser
DNXXAXXXXXXHIXXKXLXXXX

SEQ ID NO: 1422 - protein, 16 aa, Artificial sequence
  protein pattern
  Variant (2)..(3): Xaa in position 2 to 3 is Ile, Leu or Val
  Variant (4)..(4): Xaa in position 4 is Asn, Ser or Thr
  Variant (5)..(5): Xaa in position 5 is any amino acid
  Variant (6)..(6): Xaa in position 6 is Asp or Glu
  Variant (7)..(7): Xaa in position 7 is Asn or Ser
  Variant (10)..(10): Xaa in position 10 is any amino acid
  Variant (11)..(11): Xaa in position 11 is Gly, Asn, Pro, Ser or Thr
  Variant (13)..(14): Xaa in position 13 to 14 is any amino acid
  Variant (15)..(15): Xaa in position 15 is any or no amino acid
VXXXXXXFYXXLXXXE

SEQ ID NO: 1423 - DNA, 1341 bp, Saccharomyces cerevisiae
  CDS (1)..(1341)
atgtcagcaaacagtggtgtaaaacgagccagtaaggcttttaaaacatgtttattttgtaaacggtcacatgttgtatgtgataagcaacgtccatgttctaggtgcgtcaagagggatattgcccatttatgcagggaagatgatattgcggttccaaatgagatgccatcacagcacgaaagttctccgaatgataataatatacagggcaaatatgcaaataaagcacacactggaattccgtctgactatcagaatgaaccagtcaataaaagtggatccacatatggagaggaactgtcaccgaaactagactcctctcttgtaaatgatacaaccagcttgctgcttccgcaacaacctgtatttgtgtccgagaatgttggttcggaattcagttctttgaatgaatttctttctatgctagaaaatcctctattgactcaaacatcactaagttccagcagtgcgagcaatgttcatttggaaaatggctcacaaaccacacaatcgccattagagtaccaaaacgacaatcgtagggatgaaataggagtggcaagacaagaaaataggtcgcctactattatgtcaggttcttccaatagtatctcgaaaggggataaacaagatcaagaaaaggaagagtctcgaattctagcgaatgcaaacgaaaacagtgcaccgacaccgaaggaacaattctttttaacagcggcggatccgtcaacagagatgacaccagaacaccggctgaagttggtcataaatgcgaagcttgaagcaggattattgaagccgtataattatgccaaggggtatgcaagactacaagactacatggacaaatatatgaatcagtcttccaagcaaaggattctgaaaccactatccaccattagaccggcgtttagaaccattgcgcgttcattgaaggatgttgacttagttttagtggaggagagcttcgagaggatgttattatcttatgatcgtgttttcacctctatgagcatgccagcgtgcttgtgtaggcgtaccggtgagatttacagagccaataaagagtttgcttcactggttgactgcacagtcgatgatttacgcgatggaaagcttgcgatctacgagttgatgacagaagaaagcgctgtgaatttctgggaaaaatacgggtccatagcgtttgataagggtcagaaggctgttttaacaagttgtagtcttcgaaccaaagatggaatccgcaaacggccatgctgttttagtttcactatcagaagggataggtacaacatcccaatttgcatcgtcgggaatttcatccctttgtcataa

SEQ ID NO: 1424 - protein, 446 aa, Saccharomyces cerevisiae
MSANSGVKRASKAFKTCLFCKRSHVVCDKQRPCSRCVKRDIAHLCREDDIAVPNEMPSQHESSPNDNNIQGKYANKAHTGIPSDYQNEPVNKSGSTYGEELSPKLDSSLVNDTTSLLLPQQPVFVSENVGSEFSSLNEFLSMLENPLLTQTSLSSSSASNVHLENGSQTTQSPLEYQNDNRRDEIGVARQENRSPTIMSGSSNSISKGDKQDQEKEESRILANANENSAPTPKEQFFLTAADPSTEMTPEHRLKLVINAKLEAGLLKPYNYAKGYARLQDYMDKYMNQSSKQRILKPLSTIRPAFRTIARSLKDVDLVLVEESFERMLLSYDRVFTSMSMPACLCRRTGEIYRANKEFASLVDCTVDDLRDGKLAIYELMTEESAVNFWEKYGSIAFDKGQKAVLTSCSLRTKDGIRKRPCCFSFTIRRDRYNIPICIVGNFIPLS

SEQ ID NO: 1425 - DNA, 1347 bp, Magnaporthe grisea 70-15
  CDS (1)..(1347)
atgacgtgtgacctcgaacgcccttgtaccagatgcatcaagcgaaacattgggcatctctgtcacgatgagccacgagaacatgaaagcaagaaggccaagagcgctcttgggacgtcggcggacgactccgagcaccagacagatacgacccagacctcgcgcgatacgcaagcggccgccagcacgatggcagcgtacgatggtcgaatagacgcagtcggaacgggtcttgacaacggtgccgcgacggctgtcctaggccgagggaaccccttacttgtgcaacagtcgccgttgacaggggttcgaccaaatgcaatgggttctgagaacctaaatagctttcccgggttctcggatggctggataaatcaaagtcacttccatgatatgcacggctaccatccaagcttcaacttgataacgcccgaggtaacgaacgagttcaatctcctgagcgactttctaaacggaagcctgctggaagatggctcgctgctgcaggacgaacagtcgcaaactctgccgcctggaacggctcaggccgatacaattgtttcttccttcctaaacagcaacggtgagaattccacaaccatgaacggcacagagaacagcatgcttccaccaagtgcaataccacatcaaaaagaatccctgtcgacgtcacagggtgagctgggcaagtcaatagcccgtccgtctagcactgtccccatagataaggcgcgtgaatattaccttcaagctgcagatccgtccggtaacgacacggcggaggaacgcatgcagaggctgctcaaggcaaagtatgatgcgggacttctcaagcctttcaactatatcaagggatattcacgtctctcaaattatctcgacagccatatcgcggcaacatccaagcaaaagattctacggcagctcgaccgattccggccaaagtttcgtgaaaagattcacgctttaacagacattgagcttgtatttgtcgagatgtggtttgaaaagactcttatggactacgaccgagtgtttgcaagcatggcaataccagcttgttgctggcgaaggacgggtgagatctttcgaggaaacaaagagatggcggagctcatcaatgtaccggtagatgacttgcgagatgggaaaatcgctcttcatgaaatattgacagaagagtctgtggtcaggtattgggaggagtttggcaccatcgccttcgatcctgcgcacgacacgctcctgacggcctgtacactcaaaaaccccgacgacaagtcggaattgccggcaataaagtgttgcttttctctcaagattcgaagagatgaccataaaatgtaa

SEQ ID NO: 1426 - protein, 448 aa, Magnaporthe grisea 70-15
MTCDLERPCTRCIKRNIGHLCHDEPREHESKKAKSALGTSADDSEHQTDTTQTSRDTQAAASTMAAYDGRIDAVGTGLDNGAATAVLGRGNPLLVQQSPLTGVRPNAMGSENLNSFPGFSDGWINQSHFHDMHGYHPSFNLITPEVTNEFNLLSDFLNGSLLEDGSLLQDEQSQTLPPGTAQADTIVSSFLNSNGENSTTMNGTENSMLPPSAIPHQKESLSTSQGELGKSIARPSSTVPIDKAREYYLQAADPSGNDTAEERMQRLLKAKYDAGLLKPFNYIKGYSRLSNYLDSHIAATSKQKILRQLDRFRPKFREKIHALTDIELVFVEMWFEKTLMDYDRVFASMAIPACCWRRTGEIFRGNKEMAELINVPVDDLRDGKIALHEILTEESVVRYWEEFGTIAFDPAHDTLLTACTLKNPDDKSELPAIKCCFSLKIRRDDHKM

SEQ ID NO: 1427 - DNA, 1578 bp, Magnaporthe grisea 70-15
  CDS (1)..(1578)
atggagccagccaaggggaaagatgccagcccaagcgacgacgcggcaaagccggacaccgaggtccgccaccctttgaaggccagccggagcagcgggacggaagagcagggcaaagcgccgaaaaaacggcgcaaggtcaaccatgcgtgcgtatattgtcgtagatctcgaaacattgggcatctctgtcacgatgagccacgagaacatgaaagcaagaaggccaagagcgctcttgggacgtcggcggacgactccgagcaccagacagatacgacccagacctcgcgcgatacgcaagcggccgccagcacgatggcagcgtacgatggtcgaatagacgcagtcggaacgggtcttgacaacggtgccgcgacggctgtcctaggccgagggaaccccttacttgtgcaacagtcgccgttgacaggggttcgaccaaatgcaatgggttctgagaacctaaatagctgtaaagttcccgggttctcggatggctggataaatcaaagtcacttccatgatatgcacggctaccatccaagcttcaacttgataacgcccgaggtaacgaacgagttcaatctcctgagcgactttctaaacggaagcctgctggaagatggctcgctgctgcaggacgaacagtcgcaaactctgccgcctggaacggctcaggccgatacaattgtttcttccttcctaaacagcaacggtgagaattccacaaccatgaacggcacagagaacagcatgcttccaccaagtgcaataccacatcaaaaagaatccctgtcgacgtcacagggtgagctgggcaagtcaatagcccgtccgtctagcactgtccccatagataaggcgcgtgaatattaccttcaagctgcagatccgtccggtaacgacacggcggaggaacgcatgcagaggctgctcaaggcaaagtatgatgcgggacttctcaagcctttcaactatatcaagggatattcacgtctctcaaattatctcgacagccatatcgcggcaacatccaagcaaaagattctacggcagctcgaccgattccggccaaagtttcgtgaaaagattcacgctttaacagacattgagcttgtatttgtcgagatgtggtttgaaaagactcttatggactacgaccgagtgtttgcaagcatggcaataccagcttgttgctggcgaaggacgggtgagatctttcgaggaaacaaagagatggcggagctcatcaatgtaccggtagatgacttgcgagatgggaaaatcgctcttcatgaaatattgacagaagagtctgtggtcaggtattgggaggagtttggcaccatcgccttcgatcctgcgcacgacacgctcctgacggcctgtacactcaaaaaccccgacgacaagtcggaattgccggcaataaagtgttgcttttctctcaagattcgaagagatgaccataaaatacgaaacaatgataatgatcctcacggacagacactcatgtcaggagactggattgcaccctaccaagggaacaagttgccacgtcacgaggtgctttag

SEQ ID NO: 1428 - protein, 525 aa, Magnaporthe grisea 70-15
MEPAKGKDASPSDDAAKPDTEVRHPLKASRSSGTEEQGKAPKKRRKVNHACVYCRRSRNIGHLCHDEPREHESKKAKSALGTSADDSEHQTDTTQTSRDTQAAASTMAAYDGRIDAVGTGLDNGAATAVLGRGNPLLVQQSPLTGVRPNAMGSENLNSCKVPGFSDGWINQSHFHDMHGYHPSFNLITPEVTNEFNLLSDFLNGSLLEDGSLLQDEQSQTLPPGTAQADTIVSSFLNSNGENSTTMNGTENSMLPPSAIPHQKESLSTSQGELGKSIARPSSTVPIDKAREYYLQAADPSGNDTAEERMQRLLKAKYDAGLLKPFNYIKGYSRLSNYLDSHIAATSKQKILRQLDRFRPKFREKIHALTDIELVFVEMWFEKTLMDYDRVFASMAIPACCWRRTGEIFRGNKEMAELINVPVDDLRDGKIALHEILTEESVVRYWEEFGTIAFDPAHDTLLTACTLKNPDDKSELPAIKCCFSLKIRRDDHKIRNNDNDPHGQTLMSGDWIAPYQGNKLPRHEVL

SEQ ID NO: 1429 - DNA, 1575 bp, Gibberella zeae PH-1
  CDS (1)..(1575)
atgaccgaccggaatcctgctaccgcggccaagagtgccaaacaggagcttgctaaaaccgacgatggcaaggccgtgaatcgcgacaagagctccaatactgccacttcaagcaaccaaaagacaacacctgctaaaaagagacgcaaggtcaaccatgcttgcgtatattgccgaagatctcacatgacttgcgatcttgaaagaccatgtactcgatgtatcaagcgcaatattggccatctttgccacgatgagccccgtgatgccgattctaaaaagacaaaaagcgtccaaagcagccagagcatacaggctccttctgtagtcgatgaatctgatgcacaatccgacatggcccgtagctccatctctagcacgatgggcccacctcccccaacatttgacacgacgagacagcgaggttccaagtcctttggtggagttctgggtcaaggcagcccgctgtccattgtgcaacccggccaggtctcggggctgcagggcaatgaattgaacaacggcggtagtagtaacgcaaaccaattcgtaggtttccaagatgcgtgggtgacagcacaaaaccattttcatgatatgcacagctaccatcccaactacctgattgctccagaagtcactcacgagttcaatcttcttaacgacttcctccatactagcctactcgatgacggcggtgtttcatcagaggatcaacaaagctcggcattcaaaaggacaagccagagccagtcggagatgctacccaggtttggaaacaacaacaaccccatgaacgctggtggttcaaatagcatgacaaatatgtcaggatcaatgctgccaccccctccgaacaaagaaggcaagaacattccacgaccgggaagtgttgtgccagtcgacaaggcccgcgaatattatctacaagctgcggatccatcgggcaacgacacgcctgaggagcgtatgggacgcgtactccgggccaagtacgacgccgggctactcaaaccgttcaattatatcaacggctatactcgcttgggtacatacctagactcccacatcgcggcgtcgtccaaatctaagatcataaaaaccatcaactcgttccggcccaagttccgagaaaaggcgcaagctttgacggatatggagcttgtgtacgttgagatgtggtttgagaaacagctcatggattacgaccgggtctttgctagtatggccgttcctgcgtgctgctggcgacgaactggcgaaattttcaggggaaacaaagagatggcagaattgattggcgtgtcggtagcgcaattgagagatggcaagattgcgttgcacgagatccttactgaggaatcgatggtgcgatattgggaagagtttggcacgattgcttttgatcccgcgcatgagaccctcttgacggcatgctctttaaagaaccccagtgcggagtcaacacatcctattgtgaaatgttgtttctcgttcatgataagacgcgatgagcacaagctaccggctctgattgttggcaatttcctgccgcatgacccaccaactcaataa

SEQ ID NO: 1430 - protein, 524 aa, Gibberella zeae PH-1
MTDRNPATAAKSAKQELAKTDDGKAVNRDKSSNTATSSNQKTTPAKKRRKVNHACVYCRRSHMTCDLERPCTRCIKRNIGHLCHDEPRDADSKKTKSVQSSQSIQAPSVVDESDAQSDMARSSISSTMGPPPPTFDTTRQRGSKSFGGVLGQGSPLSIVQPGQVSGLQGNELNNGGSSNANQFVGFQDAWVTAQNHFHDMHSYHPNYLIAPEVTHEFNLLNDFLHTSLLDDGGVSSEDQQSSAFKRTSQSQSEMLPRFGNNNNPMNAGGSNSMTNMSGSMLPPPPNKEGKNIPRPGSVVPVDKAREYYLQAADPSGNDTPEERMGRVLRAKYDAGLLKPFNYINGYTRLGTYLDSHIAASSKSKIIKTINSFRPKFREKAQALTDMELVYVEMWFEKQLMDYDRVFASMAVPACCWRRTGEIFRGNKEMAELIGVSVAQLRDGKIALHEILTEESMVRYWEEFGTIAFDPAHETLLTACSLKNPSAESTHPIVKCCFSFMIRRDEHKLPALIVGNFLPHDPPTQ

SEQ ID NO: 1431 - DNA, 1998 bp, Gibberella zeae PH-1
  CDS (1)..(1998)
atgccgcacgaaatggaggagaatagtgctgaggtctcggatgttatgtctgagaacgaggacgagacggaaacttttatcaaagacgacgacgaaaagatggcagaccagaacaatactgaggtcaagaagaagtacgacccaaaggatcctttacgtccaagaaggaaaaaggctcgcagggcttgctttgcctgccaacgggcccatctgacttgtggagatgagagaccatgccagaggtgcatcaagcgaggtctcgctgatgcatgtcaggacggtgttcgaaagaaggccaaataccttcacgatgctcctccagaagctcttcggcctgttcttggccccaactacaaccccaataccaatcctacacctccacggcccaacgcacaacgtcaggattcgaatgcgagccagtcagatagcttgtctgcgaacgggagtaacttcttttctcaagcgagcacaacgactttgccggtctattcaacaggcgcacaagctcctgtcggcattgagggcctcccctttaatcctcaaacttccccaacagttttccaacccccaatcgccaatccgcacccgccaatgaacaacatattgcccgccggaaatatggactttaatgccttgtttgatcccagtaatcctgccctgtacaactttgaccttgagggcctcaatttcggtagtcagtatgcaggttgggaattcgggattcttaacaagatggcccttggggccgagacaccaccacgggagaactcaatgtcgcaaactccaacaaccgaggccaactatgcggctctattcgggaatgcaaatgggaacgcgaatggctttgatcatcccatgttaggggctgacttctcgggtatggaccagaataatcagtctctctatgcacagggaaacctccagcatgggttaccccatgcctatgccattgcggctggacctacaagtcttgccagcccaagtacagatgccacagctagtccccattcagtcgcgggcatggaaggctcaccaaaccacaatttcgcgggcatccctaccgttcctggcgcgcagagacacaggccgaagactgccaaggcagctccgaagtcgtaccttggcaaacgtcagagagattctgccgctatctacgaaagcgtcaaggagccctatccttacaccaccggatttcacaatatggtggctgtcttgcgaaaccgtctgcctgccaataagctattaagaattgccaaggcccttggagagattcgaccatcattcatatcgtgtaccaaagatttgacccgacaggatctcattttcatggagaaatgctttcagagaacattggtcgagtacgatgactttctgcagcattgctgtgccccaacaatcgtgtgtcgaaggtcgggcgaagtagctgctgtcaacaaagagttcatcgcgttgacgggatggacaaaggaggtgctccttgggaaagagcccaatctcaacatcaatacctatagcggtcgctcgaccaatgggtccaatacgccagacaacaatacgcagggagatatgcccacgcctcgccctcagaaggctacacttgacaacagcaacgggcgccctcaacctgtgttcctgggtgagcttcttgatgatgacagcgttgtcgagttctaccaagattttgccgagctagcttttgaagatagccgtggcaaggtacaaagaagctgcaggctcaataagtaccggtcatctcagagcctggatatcaagtcagaacatggcgtcccaaaagacatccaaccgggtattctcagcagccgagttacgcgcattgacagcgagcacggtatctcgaggattgagagagatggcaaagttgagtgcacctactgttggaccatcaagcgagatgtcttcgacattcccatgatgatcattatgaatttcttgccgcggtatttaccggaccaaggccctcagcaactggcggtttag

SEQ ID NO: 1432 - protein, 665 aa, Gibberella zeae PH-1
MPHEMEENSAEVSDVMSENEDETETFIKDDDEKMADQNNTEVKKKYDPKDPLRPRRKKARRACFACQRAHLTCGDERPCQRCIKRGLADACQDGVRKKAKYLHDAPPEALRPVLGPNYNPNTNPTPPRPNAQRQDSNASQSDSLSANGSNFFSQASTTTLPVYSTGAQAPVGIEGLPFNPQTSPTVFQPPIANPHPPMNNILPAGNMDFNALFDPSNPALYNFDLEGLNFGSQYAGWEFGILNKMALGAETPPRENSMSQTPTTEANYAALFGNANGNANGFDHPMLGADFSGMDQNNQSLYAQGNLQHGLPHAYAIAAGPTSLASPSTDATASPHSVAGMEGSPNHNFAGIPTVPGAQRHRPKTAKAAPKSYLGKRQRDSAAIYESVKEPYPYTTGFHNMVAVLRNRLPANKLLRIAKALGEIRPSFISCTKDLTRQDLIFMEKCFQRTLVEYDDFLQHCCAPTIVCRRSGEVAAVNKEFIALTGWTKEVLLGKEPNLNINTYSGRSTNGSNTPDNNTQGDMPTPRPQKATLDNSNGRPQPVFLGELLDDDSVVEFYQDFAELAFEDSRGKVQRSCRLNKYRSSQSLDIKSEHGVPKDIQPGILSSRVTRIDSEHGISRIERDGKVECTYCWTIKRDVFDIPMMIIMNFLPRYLPDQGPQQLAV

SEQ ID NO: 1433 - DNA, 1890 bp, Candida glabrata CBS 138
  CDS (1)..(1890)
atggttaaagcgtgtgagttctgccatgaaaagcacttgcactgcgatccgggcagaccgtgcataaactgcgttaagcggaaccgaggccagctgtgtagggataaagagcggaagaagtcaaagaagagcggtgttgaaaaatctgttggtggttcagatgctcaatcatctggaagttcacaaagcaataatacggccgaagtcaatgtgtcagccgattatactgctggtacaatgtttaataatatgggttttgacccattacagcaatcaaactatggttttgatactatgacgaggcagaataacaataatgataacactttattaaacagttctaataataacgctattgatatggggaatagatggagcagtcagccagatgtggtagataatatggtaagtccaaacataacagatggcagtaacactgtggaattcgatagtgcatgggctaataatgaatatatgaaactagatgagttgactaaaaatggtccgccaatgatgttctcctcgtatccgaactctgtcaccgaaaatttggatcaagataatgcagtagaggatctcccgatatcagtattgccaggaagtaagactaagaatggcacggccgaaaacctttcccagtttttaaatatcgggaggcccttacataaaacgcagtcaagaccatatatctctttagatatgatgacagcaggcatgaaggatgacattttacctccagagacatacaacacaacatcactaggcgataattacttatctcctatcaattcggtgggatcatcgacaaatcaactaaacgattatcaagacagcataccgcaccagaagacgatgacttctcctgtgcttccgacacaatctccatcttccgctttcaatccggcaaaacttccaacacaggtttcgatatcggcaatatctcctgatgataataacgaggatgatcagaaatcaagttctgggataccatccaaatctgataaagagaaaaataataaaacgaaaaaggcgaaagagaagatatttaaaacttcgccaaatgatatattaatctctaagaagaatccaaagggtcataaatctaccaagaggaaaaatgagaaagctgacatatcaccttataaatttagacagctggtaaaagtccctgaagacttgtatgaaaaacaatacctgatcaagccgcataactacagacatacatacaagaaacttttagaacaattggagaaaatattcctttcagataatagtcccaagagaaggggtcaattacaaagtattgtgaaatgcatattagaagattatgtaccgacattcatcgcgcttacatcaaatatgattgaatcagacttgtacttgcaagagttgacgttacaaaggacacttttggaactggaaagcatggcaaagcttgtgaactgttctccaatttgtatatggagaaggtcaggagaaatttcatatgttagtgatgagtttttgcagctaactgggtttaaacgtaaggagatattagcaagtaggcgatttatttttgaattcttagatcctacaagcattgtgaactatttcaccaatttccatgaatacttggcatttggatctaagaatcagatgacaagcaatatctcactgataaagcaaggcttattggtaaatggtgctgtggttagaaaaagtaacccaatagtatcatcaagccctatgtgtggaaccaatactgacgggatatttgatgagtgccacctattattgagtaatggttattatttaaaatgcgccacctgctggacagttaaacgagacagtttcaacatcccacttctgattatgggacaatttctgcctgtatttgaaggccagtag

SEQ ID NO: 1434 - protein, 629 aa, Candida glabrata CBS 138
MVKACEFCHEKHLHCDPGRPCINCVKRNRGQLCRDKERKKSKKSGVEKSVGGSDAQSSGSSQSNNTAEVNVSADYTAGTMFNNMGFDPLQQSNYGFDTMTRQNNNNDNTLLNSSNNNAIDMGNRWSSQPDVVDNMVSPNITDGSNTVEFDSAWANNEYMKLDELTKNGPPMMFSSYPNSVTENLDQDNAVEDLPISVLPGSKTKNGTAENLSQFLNIGRPLHKTQSRPYISLDMMTAGMKDDILPPETYNTTSLGDNYLSPINSVGSSTNQLNDYQDSIPHQKTMTSPVLPTQSPSSAFNPAKLPTQVSISAISPDDNNEDDQKSSSGIPSKSDKEKNNKTKKAKEKIFKTSPNDILISKKNPKGHKSTKRKNEKADISPYKFRQLVKVPEDLYEKQYLIKPHNYRHTYKKLLEQLEKIFLSDNSPKRRGQLQSIVKCILEDYVPTFIALTSNMIESDLYLQELTLQRTLLELESMAKLVNCSPICIWRRSGEISYVSDEFLQLTGFKRKEILASRRFIFEFLDPTSIVNYFTNFHEYLAFGSKNQMTSNISLIKQGLLVNGAVVRKSNPIVSSSPMCGTNTDGIFDECHLLLSNGYYLKCATCWTVKRDSFNIPLLIMGQFLPVFEGQ

SEQ ID NO: 1435 - DNA, 1389 bp, Candida glabrata CBS 138
  CDS (1)..(1389)
atggaagaaccagcagccaagaagcagaagaagctgtacaaatcatgcatattttgccgcaggtcgcatgtgaattgtgatcatcagcgaccttgttcgcggtgtatcaagagggagataggccatttatgtgttgctgatgagaatgtctctaatatacaaagccaataccaatataagaatagtatgtcgccaatagggagcacagaaatcccaaatgctgagatcaatataggtgatgaaacccgtgcaattcagggctcgaatagcagcgtatatggtacagaaacaccaatatcatcctctaacaataacctattattacccccacaaccaaactttgtatcggaaaatgtaggatccgagtttagttcactcaatgaattcctgatgatgttggagaatccaataccgggtgaatcagaaaataccagccaaagtaataaagagcaagaacgtacagctcactccaacatggaagatagcatagagaatacgcaagagcagaccgataacaatgaaggtattataggaagtgttagtgtgaaccaggaaatctcgcaggatataaacgaagcaagtagtaaagctaacggtaccaagacagtcaatgatggacaagggcaagaacaagaccaggagcataatagacaaaaactgaataaacaagagagcagcaattctaaagctcaaagtgacaaatatgacgatacacccacatcaaaggaacagttcttcctaaccgctgctgatccgtccaccgaaatgaatcccgtagacagactgaagctagttatcaacgcgaagctagaagcagggctattaaaaccatatgactacgccaaagggtacgcaagattacaagaatatatggataagtacatgaacgacacgaataagcaaagaattttgaaaccattaatgagcatacgacctgcatttaggaccatagccaagtcgttaaaggatgtagacttggttttagtagaggagagctttgagaggatgttactatcatatgatcgagtattcacttcgatgagtatgcctgcatgcctctggagacgtactggtgaaatatatagggccaacaaagagtttgcatcgctggtagactgcacggtggatgatctgcgcgatggtaaacttgccatttacgagttgatgactgaagaaagcgcagtaaatttctgggagaagtatggttccattgcctttgataagggccaaaaagctgtactcaccagttgctcgctgagaaccaaagacggcttgaagaaaaggccttgttgtttcagtttcacaattagacgtgatcggtacaacatccccatctgcattgttggtaactttatcccactatctcctacaagagatcattccaactaa

SEQ ID NO: 1436 - protein, 462 aa, Candida glabrata CBS 138
MEEPAAKKQKKLYKSCIFCRRSHVNCDHQRPCSRCIKREIGHLCVADENVSNIQSQYQYKNSMSPIGSTEIPNAEINIGDETRAIQGSNSSVYGTETPISSSNNNLLLPPQPNFVSENVGSEFSSLNEFLMMLENPIPGESENTSQSNKEQERTAHSNMEDSIENTQEQTDNNEGIIGSVSVNQEISQDINEASSKANGTKTVNDGQGQEQDQEHNRQKLNKQESSNSKAQSDKYDDTPTSKEQFFLTAADPSTEMNPVDRLKLVINAKLEAGLLKPYDYAKGYARLQEYMDKYMNDTNKQRILKPLMSIRPAFRTIAKSLKDVDLVLVEESFERMLLSYDRVFTSMSMPACLWRRTGEIYRANKEFASLVDCTVDDLRDGKLAIYELMTEESAVNFWEKYGSIAFDKGQKAVLTSCSLRTKDGLKKRPCCFSFTIRRDRYNIPICIVGNFIPLSPTRDHSN

SEQ ID NO: 1437 - DNA, 1605 bp, Kluyveromyces lactis NRRL Y-1140
  CDS (1)..(1605)
atggtagaaacaaaggtcgtgaagaagagaaagaaagtgaacaaagcctgtgtattctgcagaagatcgcatatggtttgtgatgaacaaaggccgtgtagtagatgtgttaaacgttcgataggccatttgtgccgggatgaagatcctgaaggagctctccctggtactgtagagcactccagtagcagtggattggagttgagggtacccaaggttgatgttgataatactgcaggtctagttgattcatcaagggtgagtctttctgccccgcatcaattaccgacagcacatgatcataaccatgaccgaagtctcgatcaccaacgtgaggtgcaacaagcacaacagcagcagcaccaacatcatttggatatccaaccgattcctgcacatttagcccaggtcatgcctgagcaccagggttctcataatccgagtcatacagcccatggcaatactactactgcgggcccagcagctgtagtacaccctgcgcatgagggagtaccttctatcaataatactactggtaataatctaaactctgtacatggatcgaatatgcatcacgcactgtctggtacttcgttaggtcggatctcatcattaaatcagccacttttcctttctgagcacatcggttcggagttcagttcattgaatgagttcttgacaatgcttgaggaccctatgctaatagagcctggaacccccatacagcatcatatgaatgctcagataacagctgctgaccacccggcgcaagcaaccgaccaacccgaatatcactctcagcagccacttgtagcacatgaagttaccacgcagcccaacaatatgaacaattcgcaacatccaatgcacacacaaatgcaatcaccagtgcacagcaacgtgcaaaatgcaggaggaatgtcaccgcctcttctgcccgatgatcaacaaccgaccccaaaggaaaatttcttccttactgctgcagatccgtccacagaaattaatccagaagacagacttaaactagtcatcaatgctaagttagaggctggtctactacagccgtataactacgccaagggatattcgcggttacaaaaatttatggacaaatatatgaatcaatcatctaagcaaagaatcttaaagcctctatctataattcgtccagctttccgtgctatcgctagatcattgaaggatgtggatcttgtgttggtagaagaaagttttgaaagaatgctactttcatatgaccgtgttttcacatccatgtccatgccagcatgtttatggagacgtactggtgaaatataccgtggtaataaggaatttgcatcgttagtggattgtaaagtcgacgagcttcgtgatggtaagcttgctatttatgagttgatgagcgaagagagtgctgtcaacttttgggagaaatacgggtcaattgcctttgataagggacaaaaagcagttttgaccagctgtaatttaagaacaagagatggcagacaaagaaggccgtgctgttttagttttacgataaggagagacagatacaatattcctatctgcatagtaggtaacttcatacctatatcatga

SEQ ID NO: 1438 - protein, 534 aa, Kluyveromyces lactis NRRL Y-1140
MVETKVVKKRKKVNKACVFCRRSHMVCDEQRPCSRCVKRSIGHLCRDEDPEGALPGTVEHSSSSGLELRVPKVDVDNTAGLVDSSRVSLSAPHQLPTAHDHNHDRSLDHQREVQQAQQQQHQHHLDIQPIPAHLAQVMPEHQGSHNPSHTAHGNTTTAGPAAVVHPAHEGVPSINNTTGNNLNSVHGSNMHHALSGTSLGRISSLNQPLFLSEHIGSEFSSLNEFLTMLEDPMLIEPGTPIQHHMNAQITAADHPAQATDQPEYHSQQPLVAHEVTTQPNNMNNSQHPMHTQMQSPVHSNVQNAGGMSPPLLPDDQQPTPKENFFLTAADPSTEINPEDRLKLVINAKLEAGLLQPYNYAKGYSRLQKFMDKYMNQSSKQRILKPLSIIRPAFRAIARSLKDVDLVLVEESFERMLLSYDRVFTSMSMPACLWRRTGEIYRGNKEFASLVDCKVDELRDGKLAIYELMSEESAVNFWEKYGSIAFDKGQKAVLTSCNLRTRDGRQRRPCCFSFTIRRDRYNIPICIVGNFIPIS

SEQ ID NO: 1439 - DNA, 1524 bp, Kluyveromyces lactis NRRL Y-1140
  CDS (1)..(1524)
atgtctgtcaagaggaataagaaagtcagtgtggcctgtgtacactgtgccaaatcccacgttacttgtgatgacaaccgtccatgtactaggtgtatacggaagggattggaggaatcttgcatagatgcaccaaggaaaaaagtcaagtacctgcgcgatgtgccagaagatcaacttccttctgtcttaaggtctactaaacaggtaccgcctgtaaatgctgttaagctgaaaatggaacctggcattctgccgaacataccattagattatgatggtggtacaatccgacagtctgctcctgccaataacggtaagaataatccggagacgcaacaaactctgagcaacggtcagatcactcacaggcccaaatttttgtctagtgcagcagatttggaatactctattctatctgatatcattcatggggactctttgtttaataagattcctgtcaattttctgtattctaatcctacagagaagacaccaagcccgattaaccaaggatctctgaacggtcagcaagatctgcatttttcattacagctgcgatccaaacctatgaatcagataaggggaaatacaagagcaatatattctaatcttttaggacctgtttcgcatgagattttacagtcggaatttaatctctataccaatcatttcccgttacaacctcaagaaagtttagatggcacgctcgatttcaagcggatgactattgggactttgtccccacatctgacgaaatttgacaaaactataaaccagtactacttgaattttgctaatacttttccagagatatacgattcaagaaagatacctaatctttcatacgcactcgaagtggaaccaccagaatacagagagataccgcacgataccgagatcccgcatactttgaggttcactacaccatcagaaatatattcgttggttcaaacagcgtttccaagtactactggtttccatgcattgcttcgatatctcaaaagaagatttgacaaaaatcaattggtggaaatgtgtcgctgcttagctgagttacgaccaattttcattgccagtactatcgacctcaccgatgaagatatgatatttatggaaaagagccatcagagaactttattagagtatgagaaattcatctctcaggttggtaccccaacttgtgtatggagacgtaacggacagatcagttatgtgaatgacgagttttctctattgactggctggaatcgtctagaactactcaacaaaatgaccttcatagtcgaattgatggatggtgatacggtaatggagtacttccaaacgttcactagggttgcatatcaggggttcagaggtgctgaaactatgcgaatttgtaatctattaaccccgatcaagggaagcgttattaaatgttgttgtctatggacgctaaaaagagacgcctttggtttacctatgatgataatagggaacttcatgccaattctcaccctaccagaagacgttgggttttga

SEQ ID NO: 1440 - protein, 507 aa, Kluyveromyces lactis NRRL Y-1140
MSVKRNKKVSVACVHCAKSHVTCDDNRPCTRCIRKGLEESCIDAPRKKVKYLRDVPEDQLPSVLRSTKQVPPVNAVKLKMEPGILPNIPLDYDGGTIRQSAPANNGKNNPETQQTLSNGQITHRPKFLSSAADLEYSILSDIIHGDSLFNKIPVNFLYSNPTEKTPSPINQGSLNGQQDLHFSLQLRSKPMNQIRGNTRAIYSNLLGPVSHEILQSEFNLYTNHFPLQPQESLDGTLDFKRMTIGTLSPHLTKFDKTINQYYLNFANTFPEIYDSRKIPNLSYALEVEPPEYREIPHDTEIPHTLRFTTPSEIYSLVQTAFPSTTGFHALLRYLKRRFDKNQLVEMCRCLAELRPIFIASTIDLTDEDMIFMEKSHQRTLLEYEKFISQVGTPTCVWRRNGQISYVNDEFSLLTGWNRLELLNKMTFIVELMDGDTVMEYFQTFTRVAYQGFRGAETMRICNLLTPIKGSVIKCCCLWTLKRDAFGLPMMIIGNFMPILTLPEDVGF

SEQ ID NO: 1441 - DNA, 1716 bp, Debaryomyces hansenii CBS767
  CDS (1)..(1716)
atgagcgaaattaaaaatgaaccaatgtctaactcagactctgttgcgtcaagtaacagtgcaaaaatgagacggaaaaaaaccaacagagcatgtaatcattgtcacaaggctcacatgacctgtgacaccaatagaccttgtcaacgttgtttacagagaggtttggaaagcagctgtcaggatgcacctagaaaacgaaagaaatatttagctgatgtgccaccaaacgtattaagtcgacatgatggattatcgcaatcaccgccttatgaaatgggtaaaaatgacacgattaattatcaaagtggtccgtttcaagagagacctcctctgtctgagtttaatccacctatgcctacggccaacacagacaatgatataaatcaagactttggggcatttggagtgtatcctaatagtcatttgtttccatctaatacaaatcaaacaaatcaagacgcaggtgctgatatgtctcattctcaaggtcaactgaaaccacctataaatcagcatatgcatcaacaggggttaccactgtacaataaaccgagacgaacaaatttcctatcgtcggcagcggatttagaatattcgacactttccagcattcttcaggacaatttcgttcatgtcaataataatacctcagcagaaggtaccccaaattcacttaatttgtcgccatcagtacttcccaacaatgcaccaaacacgaacattactgattcgaggaatacaacatcttctaatagcttgaataactatggccaacagaacaaacctatgaattacacctccggatcatctcatgcatcttctcctaacgattctatttttaatagcaaacaaatgtcatcaataaatggcatcaataaaaataaatattactattcatcgaagtatcccaagtgtgatgaaagtattaatcaatatttcttgggcccaactggctctgatcatgaattgatttacccagatgttataactgctattgaagagatgaaggcactcgatcctgctgtttaccacgaaagaaattccaagctgctgttgtcatttactataggaataattccagaatcaaatgagtatacaaagggcaggaagccacaagaaaataaggaaacttttaaagaacccgatgaaatatatgcaaaggtcaacaagccattctcatatacccctggataccattcgttgattgcttacttacgtaagaggttccccaaagaaatgttagtaaagatggcggaatccattgctgcttaccgtccatcatttattgcttgtacaaattcattaaaagaaagcgacttaattttcatggaacaatgctttcaaaggaccctacttacatacgataacttcattcgtgtcagtggtaccccaactatcgtttggagacgaacaggtgaaattgcatacgtaggaaatgaattttgcgtattgacagggtggaaaaaagaagatcttttgttgaatactaagaagtttatagtggagcttcttgatgataagtctgtagtagagtatttccagttattcctgaagatcgcatttggtgatttcttgggggctacaatgacagaatgtactctattaacaccaaagaaagatgtaaagataagaaccggatgcatgtggacgttgaaaagagatgtattcggtattcctatgatgattatcgggaactttttacccataatatag

SEQ ID NO: 1442 - protein, 571 aa, Debaryomyces hansenii CBS767
MSEIKNEPMSNSDSVASSNSAKMRRKKTNRACNHCHKAHMTCDTNRPCQRCLQRGLESSCQDAPRKRKKYLADVPPNVLSRHDGLSQSPPYEMGKNDTINYQSGPFQERPPLSEFNPPMPTANTDNDINQDFGAFGVYPNSHLFPSNTNQTNQDAGADMSHSQGQLKPPINQHMHQQGLPLYNKPRRTNFLSSAADLEYSTLSSILQDNFVHVNNNTSAEGTPNSLNLSPSVLPNNAPNTNITDSRNTTSSNSLNNYGQQNKPMNYTSGSSHASSPNDSIFNSKQMSSINGINKNKYYYSSKYPKCDESINQYFLGPTGSDHELIYPDVITAIEEMKALDPAVYHERNSKLLLSFTIGIIPESNEYTKGRKPQENKETFKEPDEIYAKVNKPFSYTPGYHSLIAYLRKRFPKEMLVKMAESIAAYRPSFIACTNSLKESDLIFMEQCFQRTLLTYDNFIRVSGTPTIVWRRTGEIAYVGNEFCVLTGWKKEDLLLNTKKFIVELLDDKSVVEYFQLFLKIAFGDFLGATMTECTLLTPKKDVKIRTGCMWTLKRDVFGIPMMIIGNFLPII

SEQ ID NO: 1443 - DNA, 1635 bp, Debaryomyces hansenii CBS767
  CDS (1)..(1635)
atgactaaaaagcttagcccacttgaaaaaaagaacagaaaaccggcttcgaaagcctgtgttttttgtcactcaaagcacttgcaatgctctaatgagaggccttgcaagaattgcatgaagcgaaacctaggtgatcaatgccatgacgctattagaaaacgggcaaagtacttaaatacctctggtgtgaagaagatgaaatcaaggacaaattcaattctgtcaagctacaggtctcccagtgtatcagaatctccccagaatccatatacccatagcattattaaacaggaaccagacttaaacatgagaggagaattacagtcaattcagcaagaaaatacatcacataatcaacctggtccatcaaatgtactgcactacgtagatcagagacccacgatccctacaaataccatgctagacacaacaaacgatgtattgaataaactattatatagcgaaccaatacattcggattctatatcactaagggattcaatatctgagcaacctgaaatggattcgaacaggagaagcatagatactatgttcaattccaattaccttaatcaagaatacctcatgctaggggatataatattgcattcgaagccatcatccccttctccttcaaataccagtgcttctgaatacaatggcgatgcgacgatttccccagcaaatactttgttaaataatactaggttggatttcgataattcaaatgaccatatgtcaaattctaagaggaagcttaataaactaaaagattcaaggccattcatagctttaggcgtttcaaatgatgtgccaataagtttacaacctgaaggtactctaagtttagataatcttagtactaaaaacgaaattatgaataaagacaacatatcatcaaatctgctcaaaaccgactacgtgtctcccttaataagtcatcacatataccagtcagtccaagacatatatatgcacagcattccgaattttgactatccccagtcgtatcacctgttaactaactttctaaagagacggtttctgggaaactctctagcacatgaccaaagacaggctaaacgtaacaatttattaatcatattaaagctaattgctagttataggccaaccttcatttctgcccataaaaacttgttgaaaccctacgacttgttgtttttagaaatgtcttttcaaagatcattaatagactacgaaaaactactactttttaattcttctccatctatcatatggcgtagaacgggtgaaatagtttccatttctaacgatttactaagtatattaggttttaatttgtcagaaattttgtccaaacgaacttttatcatggaattaatgtatgacgacgagtctattattaattacttcaagttgtttaaatcggtggctgttggtaatttacacctgagtattattacgaaatgtaagttaatgaaaaattcatcggctgcatttcataatgaagcgtcagatgttgcagatagagagtatattgaattttgctctgcatggaccgttaagagagacccatttgatatacctatgttaattataggtcagttcttaccaatattaccgggtggagaaggtgtaaggaagtattga

SEQ ID NO: 1444 - protein, 544 aa, Debaryomyces hansenii CBS767
MTKKLSPLEKKNRKPASKACVFCHSKHLQCSNERPCKNCMKRNLGDQCHDAIRKRAKYLNTSGVKKMKSRTNSILSSYRSPSVSESPQNPYTHSIIKQEPDLNMRGELQSIQQENTSHNQPGPSNVLHYVDQRPTIPTNTMLDTTNDVLNKLLYSEPIHSDSISLRDSISEQPEMDSNRRSIDTMFNSNYLNQEYLMLGDIILHSKPSSPSPSNTSASEYNGDATISPANTLLNNTRLDFDNSNDHMSNSKRKLNKLKDSRPFIALGVSNDVPISLQPEGTLSLDNLSTKNEIMNKDNISSNLLKTDYVSPLISHHIYQSVQDIYMHSIPNFDYPQSYHLLTNFLKRRFLGNSLAHDQRQAKRNNLLIILKLIASYRPTFISAHKNLLKPYDLLFLEMSFQRSLIDYEKLLLFNSSPSIIWRRTGEIVSISNDLLSILGFNLSEILSKRTFIMELMYDDESIINYFKLFKSVAVGNLHLSIITKCKLMKNSSAAFHNEASDVADREYIEFCSAWTVKRDPFDIPMLIIGQFLPILPGGEGVRKY

SEQ ID NO: 1445 - DNA, 1632 bp, Debaryomyces hansenii CBS767
  CDS (1)..(1632)
atggatggggagagtaaccatagaagtatcacgggtatgagacccgaagagctcgctagcagcattagctccaggagcgttatgactgatccggggtctagttcagaagatacaaagaaatccaaaacaacaaagaaacggaaaaagaaggttgagattgcatgtgtttattgtcgcaggtcacatatgatttgtgatgattcaagaccctgtcagcgttgtatcaaaagaggtataagccatttatgtcatgatgaaccatctaattcaagacaacgtaagaaggcagaagccatggtcaaacaaccagaaccaaatgaaccgcattcacaaccaatacaatcgcagtctatggcacaacccattactgcccaaagttttttgcctaccgatcaaagaatcccggttaacttgaatcctcaacacaaatctgtcaataactcagttttatcgcaaacgttgccgtacaagcaggagccatttttctattctgaacatgcgggtagtgaattcagctcactaaatgactttttgtcgatgattgacgatcctgacttagtgcacggtaatttaaatgacgagactgttaataatgatcctttgtatgcgtttgggatgggtaatagtggtaataatataagtaacattgatataccgaaccattcaaataataacggtaacactaataataatcataatcctaataataataatcataatactaataataataacaataataatactaataaccataatagcactaataataatggcaataatttgacgaatattttatcgttttccccaaatgttaatatgttttcgccttctttttcaaatgaccctgaatctgtggatcaaacccaaaaccaatcacatatgcaatcccaggttaatagtaatacctatggtaaaccgaaaaataacttacgcccgtccactaatcaagccacccatcaacctgccatatcggatgcagcaagagataaatttttcctaacagcagcagaccctactactgaaatatctccagaagagagattgaagcaagttatcaaggctaaattggaggcggggttgttgcagccctataattatgcaaaaggttatgcaagattacaaagctatatggataactatatgaatttgtcaagtaggcaaagaatattaaagccgttatccgtctttcgtcctgctttcagggcaattgctaggacccttaaggatgtcgatttagttttggtagaagagagttttgaaagaatgcttttagattatgatagagttttcacgtctatggcaatcccagcatgtctttggaggcgtacgggtgaaatatatagaggtaataaagagtttgcgtcgttagtaggagtactgacagatgacttaaaagatggtaaattagccatatatgagttgatgagtgaagaaagtgccgtcaacttttgggaaaaatatggtgctattgcattcgacaagggccaaaaggctgttttaaccagttgtaacttaagaactaaagatggtataaaacgaaagagttgttgtttcagtttcacaatcagaagagataggtataacataccaagttgtatagtaggtaattttataccaatcgacccttag

SEQ ID NO: 1446 - protein, 543 aa, Debaryomyces hansenii CBS767
MDGESNHRSITGMRPEELASSISSRSVMTDPGSSSEDTKKSKTTKKRKKKVEIACVYCRRSHMICDDSRPCQRCIKRGISHLCHDEPSNSRQRKKAEAMVKQPEPNEPHSQPIQSQSMAQPITAQSFLPTDQRIPVNLNPQHKSVNNSVLSQTLPYKQEPFFYSEHAGSEFSSLNDFLSMIDDPDLVHGNLNDETVNNDPLYAFGMGNSGNNISNIDIPNHSNNNGNTNNNHNPNNNNHNTNNNNNNNTNNHNSTNNNGNNLTNILSFSPNVNMFSPSFSNDPESVDQTQNQSHMQSQVNSNTYGKPKNNLRPSTNQATHQPAISDAARDKFFLTAADPTTEISPEERLKQVIKAKLEAGLLQPYNYAKGYARLQSYMDNYMNLSSRQRILKPLSVFRPAFRAIARTLKDVDLVLVEESFERMLLDYDRVFTSMAIPACLWRRTGEIYRGNKEFASLVGVLTDDLKDGKLAIYELMSEESAVNFWEKYGAIAFDKGQKAVLTSCNLRTKDGIKRKSCCFSFTIRRDRYNIPSCIVGNFIPIDP

SEQ ID NO: 1447 - DNA, 1437 bp, Yarrowia lipolytica CLIB122
  CDS (1)..(1437)
atgtatgggaaccaccagccacaacagcagcccatcaagcgaaccaagcggaaaaaggtcgaccaggcttgtgtttactgtcgacgaagtcacatgacgtgtgacaacaaccgcccgtgttcgagatgtgtgaaacgaaacatttctcacctgtgtcatgatgaagccaagccagtacgagggaagcgacaacagagccagtctgacgatgaggaggaagttcagggccaacagcaacaacaacagcagcagcagggccaaggacaacagggccaaggacaagtcagtggcttgaatacccccaacgcaggcatgtctgctcagttcatgaacgctggaggtattcagaatggtttgtttttctccgagcatgccggatccgaattttcctcgcttaacgactttctgaccatgttcgacgatgtagtttatgagggacagccgagtcagggtcagaaccagggccagcagcagggtcagggtcaaagccaaggacagagtgaaaacgggaccgggacccaatatcgccaaggacagggtatgcaccagacacaatctcagaaccattcccagacccagtcacagacgcaaacccaggcacaggccatgtctcagggtcagcgccaacaaccgggccatcagcatcagcagttgcagagtcctggtatggcacatccagctgttacccagcagcagcaacaaggccagagccaagcccaagctcaatcgcaaaatctctctaacgcatcccttacacacgaagaccctccccaggtttcggaagctgctaggaacaagttctttttgactgcggccgatcccactattgacaattcgcccgaggagcgtctcaaacaggtcatttacgccaaactcgaagcggggcttcttcagccgttcaactatgtcaagggatacgcccgtctgcagcagtacatggacaactacatgaacatttcgtccaaacaacgaattctaaagccgttgtccatctttcggccagcttttcgagccattgcacagtcgttgaaggatatcgatctggttcttgttgaggaggcctttgagcgaatgttactcgactacgatcgagttttcacaaccatggccattccagcgtgtctgtggagacgtacaggtgagatttaccgaggcaacaaggagtttgccggcctagtgggtgttcctgtggaagatcttcgaaacggcaagctggccatctacgagctcatgagtgaggattcggcggtcaactactgggaaaagtacggcaacattgcgttcgattcgggacaaaaggccgtcctgacaagttgcaacctgcggtctaaggacgggcgaaagagaaagctatgttgtttctcgtttacaattcgacgtgatcggtacaatatccctagctgtatcgtgggtaatttcattccgattaacccataa

SEQ ID NO: 1448 - protein, 478 aa, Yarrowia lipolytica CLIB122
MYGNHQPQQQPIKRTKRKKVDQACVYCRRSHMTCDNNRPCSRCVKRNISHLCHDEAKPVRGKRQQSQSDDEEEVQGQQQQQQQQQGQGQQGQGQVSGLNTPNAGMSAQFMNAGGIQNGLFFSEHAGSEFSSLNDFLTMFDDVVYEGQPSQGQNQGQQQGQGQSQGQSENGTGTQYRQGQGMHQTQSQNHSQTQSQTQTQAQAMSQGQRQQPGHQHQQLQSPGMAHPAVTQQQQQGQSQAQAQSQNLSNASLTHEDPPQVSEAARNKFFLTAADPTIDNSPEERLKQVIYAKLEAGLLQPFNYVKGYARLQQYMDNYMNISSKQRILKPLSIFRPAFRAIAQSLKDIDLVLVEEAFERMLLDYDRVFTTMAIPACLWRRTGEIYRGNKEFAGLVGVPVEDLRNGKLAIYELMSEDSAVNYWEKYGNIAFDSGQKAVLTSCNLRSKDGRKRKLCCFSFTIRRDRYNIPSCIVGNFIPINP

SEQ ID NO: 1449 - DNA, 1671 bp, Aspergillus nidulans FGSC A4
  CDS (1)..(1671)
atgacggagaaaaacactacgcagccgggttcggccccagaccagtacgccggcaatggaacggcggaaaacacaggccccagcaagactttggatggcaacaaagtcggcagggtcgactcaaacgcgaaagagaacgcgcaaaagtcgcctgcttcaaagaccgaaagtacacctgcggggacgcgcaccagcccgaagaaacggcgcaaggtcaatcatgcatgcgtctactgtcggcgttcgcatatgacttgcgattcgcgcaatatcggacacctgtgtcatgacgaaccgagagagccgtcgaaacgatcacgtagtgaacacgagcagtctgccgcggacgaggagggctcttcaaacaacgagtactcgaaagtccacgccatgccgcggaaggtcgatattcaagatgctgcaggtcagcaaatcctggcagacgggtcccttggccttactccatcctctatgaatgccgtgcaaccagggcccatgtcctcttctacgagccaaaacatgagtgtcacgtctcagcagcaacttctcggatacaatgactgggtcggcggtcaaaatcagtttcaagacatgcatacattccatccttcttatatgttcaacgcgccggaggttacgaacgaatacaatcttctgggagacttcctcagcaacagtctgttggacgatggcagtatttttcagaacgaagatatgcagagaatgtattcggacccgacgttgataaattccatggccgtactcggaggccccagtacatcactgctccagcaatcacaaactctacaaccacagcagagtcagcaaaatcaaggtgacactgcttcgggcgctacgattggaaatgataaagcaagggaaacgtattatatgacggcggcagaccccgctgggtcagatccaccggaagagcgcatgaacaaactccttaaagcgaaatatgacgccggtcttctgcgacctttcaactacgttaagggttatgcaaggcttagcgcatacatggagaagaatctacaagtatcgtcgcgacaaaagatcgctcgacaactggacaaattccgacccaagttccgagacaggatgcaaaagctgacggatattgaactcatactggtggagatgtggtttgagcgaagtttgatggagtatgaccgtgtctttgccagtatggcgatacctgcttgctgctggaggcggacgggtgaaattttccgcggtaacaaagagatggctgaattaatcggcgttccaatcgagcttctcagagacggtaagctggctatccatgagattatcgtggaagaccagctcgtgagctactgggagaaattcggtgccatcgccttcgataacacccagaaagcaatgctcacgagctgtaccttaaagaacccgaatgccacctcgccgacggaagggataccgtgctgcttttcattcactatccgaagagataatcataacatatttttgactcccctgattctagtccgtctcttattgttggaaatttcctaccaacgcaacgggataccaaataggaaaaagcattctagcaggttccaagaccagacacagtctctatcagtttgccgcggagccttgaagcaactcactcgcttcgcgattcaaaaactcctcttctag

SEQ ID NO: 1450 - protein, 556 aa, Aspergillus nidulans FGSC A4
MTEKNTTQPGSAPDQYAGNGTAENTGPSKTLDGNKVGRVDSNAKENAQKSPASKTESTPAGTRTSPKKRRKVNHACVYCRRSHMTCDSRNIGHLCHDEPREPSKRSRSEHEQSAADEEGSSNNEYSKVHAMPRKVDIQDAAGQQILADGSLGLTPSSMNAVQPGPMSSSTSQNMSVTSQQQLLGYNDWVGGQNQFQDMHTFHPSYMFNAPEVTNEYNLLGDFLSNSLLDDGSIFQNEDMQRMYSDPTLINSMAVLGGPSTSLLQQSQTLQPQQSQQNQGDTASGATIGNDKARETYYMTAADPAGSDPPEERMNKLLKAKYDAGLLRPFNYVKGYARLSAYMEKNLQVSSRQKIARQLDKFRPKFRDRMQKLTDIELILVEMWFERSLMEYDRVFASMAIPACCWRRTGEIFRGNKEMAELIGVPIELLRDGKLAIHEIIVEDQLVSYWEKFGAIAFDNTQKAMLTSCTLKNPNATSPTEGIPCCFSFTIRRDNHNIFLTPLILVRLLLLEISYQRNGIPNRKKHSSRFQDQTQSLSVCRGALKQLTRFAIQKLLF

SEQ ID NO: 1451 - DNA, 1737 bp, Candida albicans SC5314
  CDS (1)..(1737): transl_table=12
atgtctaccatgagtactcaaaaagcaaatagttccacaccaggggagactgattcttcatcaagtttaccacctccggagataacagaacccacctataagaagcccgaaaaatcgacaaaaaggaggaaaaagaagttggaaattgcatgtgtttattgccgccgatcacatatgatatgtgatgaatcaagaccatgtcaacgatgtataaaaagagggattgcccatctttgttatgatgaaccctctaactcgcgacaacgtaaaaaggcggccgctttaagaaagactcagagtgaaggggcaccaatggtgacatcaccaataacgcttcctttgacggggtcaacggggaaccaactgccgttaccgttgccaccattacaagcatctcaactggatataaggtctgcgcctaaaacggagaattctttgcagttttcacaaccagctctacatcaacaacagatgcaggagaatccacaaggtgcatctcaatctgtccataccaacaatacacatatttattcttcccagaatcagcagcaacaaccgcaacatcaacaacagctacaacagcaacagccacagccacagcctcaatcaaggttaataaaaaactcagtgctatcccagactttgccttacaatcaacaaccattcttctactcagaacatgcaaatagtgagtttagttctttgaatgactttttgtcaatgattgatgacccggagttagtcaacggggctttaaatgatgatacagatggacttttgaattttggggttggtaacaacaacaatagcggtggcagcaacagcaatattaacaacactcacaacaacaataataacgggtttagtattagcggcgggaatagcacgactaacttgaatgcagttttggcgtattcacctaattctaatttgtttccaccaacttttggtaatgaagcggattcaactcaaatccaatcacaacaacaacaacctgaattgacacaacaaccccctgcattgaacccagtgaaggttgagcctcaagctgagaagactgaacaacaacctgtgatctcagattctgcaagagataagttctttcttacagcagctgaccctactactgagatttcacctgaagaacgattgaaacaagttattaaggcaaaattggaggcaggtttactacaaccgtacaattatgccaaaggctacgccagacttcagagatatatggacaactatatgaatatatcaagtagacaaagaattctaaagccactatcaatatttcgaccggcttttagggcaattgcacgtacattgaaagatgtggatttggttttggttgaagaaagttttgagagaatgttgttggattatgatcgtgtttttacggcaatggcaatacctgcttgtttatggagacgtactggagagatatacaggggcaataaagagtttgcctcgttggtaggtgtgaccacggacgatcttaaggacgggaagttggccatctatgaattaatgagcgaggaaagtgccgtcaatttctgggaaaagtatggtgcaattgcttttgataaaggtcagaaagcggtcttaaccagttgtaatttaagaactagagatggtattaaacgaaaaagttgctgtttcagctttactataaggagagatagatacaatattcccagttgtatagtgggtaattttatccccattgatccttag

SEQ ID NO: 1452 - protein, 578 aa, Candida albicans SC5314
MSTMSTQKANSSTPGETDSSSSLPPPEITEPTYKKPEKSTKRRKKKLEIACVYCRRSHMICDESRPCQRCIKRGIAHLCYDEPSNSRQRKKAAALRKTQSEGAPMVTSPITLPLTGSTGNQSPLPLPPLQASQSDIRSAPKTENSLQFSQPALHQQQMQENPQGASQSVHTNNTHIYSSQNQQQQPQHQQQLQQQQPQPQPQSRLIKNSVLSQTLPYNQQPFFYSEHANSEFSSLNDFLSMIDDPELVNGALNDDTDGLLNFGVGNNNNSGGSNSNINNTHNNNNNGFSISGGNSTTNLNAVLAYSPNSNLFPPTFGNEADSTQIQSQQQQPELTQQPPALNPVKVEPQAEKTEQQPVISDSARDKFFLTAADPTTEISPEERLKQVIKAKLEAGLLQPYNYAKGYARLQRYMDNYMNISSRQRILKPLSIFRPAFRAIARTLKDVDLVLVEESFERMLLDYDRVFTAMAIPACLWRRTGEIYRGNKEFASLVGVTTDDLKDGKLAIYELMSEESAVNFWEKYGAIAFDKGQKAVLTSCNLRTRDGIKRKSCCFSFTIRRDRYNIPSCIVGNFIPIDP

SEQ ID NO: 1453 - DNA, 1563 bp, Candida albicans SC5314
  CDS (1)..(1563): transl_table=12
atgacctgtgactcgggtcgtccgtgcaagcgatgcattcaaagaggattagattcaacatgtgaagatgcaccccgaaaaagaaagaaatatcttcaagatgtacccaattcttctttgatgtctaaccacagcatgaatagcagtgataatttggacagtaatggtgtgtcaccaatgcagccgacattgctgcaacccatgccacctgtacaagaactgtcattgcccacaaatatacctaatcaatctcaagttccgtcacaatcgccaaacacggccctgcaaaaacagcttctgtattcacctccattggcttctacttactcccctaatcacaagacatatctggcaacattgtttcaacacagtgcaacttcaccggagttgatgcaaacagtgcccgaatatttcccggaactttacaaccaacactatcaaccttcggcaaatcctaatcagaaaagacgaacaaatttcttgtcaacagcagctgacttggagtattctacattatcaaatattcttcaagagaactttggtcatcacacaacatcaaacgaaggcacccctaattcgcataacttttcaccagcattatcaccgcataatatgcctacaaataatactaatgcgccatctacatcaacccagttacttactaatgatcagcagcggcaggcgacatcatttaacaatcacaccaaacacaacaccccatcaccgttaaatacaagccataccaaactttatgaggatgccaggtatccaaaatgtgacgaaaccattaatcaatatttcttgggtgacaccgagtcaggtaaaatggtcgtattcccagatgttttgacagcaattgaaaatatgaaaaacaatgatccagcggtatatttggaacgtaattccaaactggcgctatcctttgtcatgagtatacagcatgaaaacaattctaacggtggtaaagaagatcaattattcaaagaaccagaagaaatatacgagaaagtgaaaaaaccattttcctataccccagggtatcactcgttgattgcatatttaagaaaaagattcacaaaaccaatgttagtgaaaatggccgaatcaatggccacatatagaccctcatttattgcatgtacaaattcattgaaagaacacgacttgatatttatggaacagtgtttccagagaacattgctaacttatgataattatataaaaatcagtggcacgccaaccattgtatggagaagaactggagaagtagcatatgtgggaaacgaattttgtgtattgactggttggcccaaagaggagttgattgggaaagataaaagaaaatttattgtagaattactagacgacaagtcggtattgcaatatttccaagttttttcaagaattgcgtttggtgatttcttaggggccactatgacagaatgtaccttattgacaccaaacccgaatgttaaaataagaacggggtgcatgtggaccttgaaaagagatgtatttggtattcccatgatgattgtggggaactttttaccaatactatga

SEQ ID NO: 1454 - protein, 520 aa, Candida albicans SC5314
MTCDSGRPCKRCIQRGLDSTCEDAPRKRKKYLQDVPNSSLMSNHSMNSSDNLDSNGVSPMQPTLSQPMPPVQESSLPTNIPNQSQVPSQSPNTASQKQLSYSPPLASTYSPNHKTYSATLFQHSATSPELMQTVPEYFPELYNQHYQPSANPNQKRRTNFLSTAADLEYSTLSNILQENFGHHTTSNEGTPNSHNFSPALSPHNMPTNNTNAPSTSTQLLTNDQQRQATSFNNHTKHNTPSPLNTSHTKLYEDARYPKCDETINQYFLGDTESGKMVVFPDVLTAIENMKNNDPAVYLERNSKSALSFVMSIQHENNSNGGKEDQLFKEPEEIYEKVKKPFSYTPGYHSLIAYLRKRFTKPMLVKMAESMATYRPSFIACTNSLKEHDLIFMEQCFQRTLLTYDNYIKISGTPTIVWRRTGEVAYVGNEFCVLTGWPKEELIGKDKRKFIVELLDDKSVLQYFQVFSRIAFGDFLGATMTECTLLTPNPNVKIRTGCMWTLKRDVFGIPMMIVGNFLPIL

SEQ ID NO: 1455 - DNA, 1701 bp, Candida albicans SC5314
  CDS (1)..(1701): transl_table=12
atgactaaaaagttaactccacaagaaaagaaaaatcgaaagccggcagtgagggcgtgtgtgttctgccatcaaaaacatctacagtgttcaaacgaacgaccttgcaagaattgtgtgaaaagaaatattgctcatgggtgtcaagatattgtacgaaaacgagtgaaatatctaactggtgaaagtgtgccaggagcagtttcgaataaacagtccacaccaagaaagaaactaaaaactggtccagtgtcaacatcagtgtccccaatggattccgtcaagtcagaattgacaactccggtggagtcttcaaatcatttcccaccacctatgtcgtcttctgtggatgcgttgcctacaacacaacatagtgcgattgagattccgccaaatgaccaaccaatcagtgacatacttgaagtccccccattattcgatagctcacatatgattagcagtgaagcaccggaaaccaacattactttgacgacacaaaacttgatcacacctgatccactactgtttcatacaaacaccgtttcaaatactacaaccgacgttttgaataagcttttgaatgataactacgaaaccgaatctatgttgagtgctaacaacagcaatggcgaccacttgctagggatggcacacacactgtctggccatctttccaacggacaacaatttcaatcaaattatttgaacgaagaatatatgatgttgggagatatcattttgcaatcgaaacaagctagcccgtcgccatcaaacacgagcacttctgagaacaacaccaacaccttgtcaccttcaagttttggatacatactgaacatcaactttgaggactttaatcaaccgaaaagaaaggtggtacagaaactaaaggattcaagaccgtttatatctttaggatttactgcagatttggctccccatgataataacaacaacaccgattactatgacgacaaaatgaccaacaatataacaggaaagactgaagagggaccagggaacccaattatcaactacaacaccaagttcacaacagattacgttccaccatctattacaaacaatctatacaagacagcaagtgatctctacagcaaggaacttaagaatttttattaccctttaagttatcacgcacttaccaagttgctcaaagtgatatttggtgggaatgatctatcgccagaggagaaacaagaaaaacgatctaaactattaattattttgaaattgatagccagttaccgtcccacatttattgccgctcaccgtgacttgatccaagaggatcttctcatgctagagatgacgttacaacggtctcttttggactacaagaaattggcagaattgaactcatcaccaaccatcatgtggaggaggacgggagaaatcattagtattactgaagacatggcacttcttttggagcacctgctgtttgatttgctaaaggaaagaagatttatttttgaattaatggacgacaatagtattgtcgattatttcaatctttttgctaatattgctgtgggtaatttgaagtcagtaattcaaacagcaattcaaatgaaaaccaaaagcagtaacctaattaaattcacctgtgttttcaccatcaaacgagatatttttgacattcccatgattgttattggccaattcttgccaattgtataa

SEQ ID NO: 1456 - protein, 566 aa, Candida albicans SC5314
MTKKLTPQEKKNRKPAVRACVFCHQKHLQCSNERPCKNCVKRNIAHGCQDIVRKRVKYLTGESVPGAVSNKQSTPRKKLKTGPVSTSVSPMDSVKSELTTPVESSNHFPPPMSSSVDALPTTQHSAIEIPPNDQPISDILEVPPLFDSSHMISSEAPETNITLTTQNLITPDPLSFHTNTVSNTTTDVLNKLLNDNYETESMLSANNSNGDHLLGMAHTSSGHLSNGQQFQSNYLNEEYMMLGDIILQSKQASPSPSNTSTSENNTNTLSPSSFGYISNINFEDFNQPKRKVVQKLKDSRPFISLGFTADLAPHDNNNNTDYYDDKMTNNITGKTEEGPGNPIINYNTKFTTDYVPPSITNNLYKTASDLYSKELKNFYYPLSYHALTKLLKVIFGGNDLSPEEKQEKRSKLLIILKLIASYRPTFIAAHRDLIQEDLLMLEMTLQRSLLDYKKLAELNSSPTIMWRRTGEIISITEDMALLLEHSSFDLLKERRFIFELMDDNSIVDYFNLFANIAVGNLKSVIQTAIQMKTKSSNLIKFTCVFTIKRDIFDIPMIVIGQFLPIV

SEQ ID NO: 1457 - DNA, 1839 bp, Cryptococcus neoformans var. neoformans B-3501A
  CDS (1)..(1839)
atgcaagaccaccagtgggtccaccctgagggcctatcctcggccgggtcgcctttatccttcaccaacagcactcccacgcccaatgcgagcctgttcaactatgccccatctcaacaccatcacagacctagcaccagctcaggctaccacatgatcaaccctagtggtcttggaaggtcaagttctgggatctatgttggtggtatcggtagtctcacaaccgttgcgccgacggcaatcccaccgcctgtcgcagtggagaagccgcttgtacctgtctttggaggtgattcaggaagggggagaccgaaaagcaagaatccaaaagcgaagccgcagggtttagggacggagagaaaggctaggaaaaaagttgcgaaagcgtgtttggcgtgccaaaagagccatttaacgtgtgatgagcaacgaccgtgtacgagatgtgttaaaaagggaatggcggataagtgtgtggagggcgtgaggaaaaaggccaagtatttgatggaaggtgatgaacgactatcatcgtcgatgcagtcacaagcatccagcgttcacagcatgtcacctcaatccatacaccaaagtctccccaccatggctaccttacccacccagtcgacggattcgcaaatacaagatgtctggctcgctaatgccatacagcgccaaaatcctacaccaaacattaacattgcaccgggtatgagcatgaaccaaagcgatgtgtgggggacacagagtgcagagatcactcctggaacttactctggttactcgaccacagctggaacagccgcgaacaacgagtatcaaatgctggatgccatgttttcttccctctctcccgttttccctggtctcaacgattccttggacgacactagccgtcaaatagcaaacgtcactcaagccggtaccaacctcgacctcgtgaacaactctggccccaactcgtttgatccccaacaaccatggatcaatccttctccttcccagtccgccaacacgtacaaccctaccccatctggatctagtgtccctggcaccggtatatcaccaagcacgtacgggggaagcgaagtgtcgccgcatcagcaatggggatgggggagcatggatgcgccaggacaggtcatgttggatggtagtggagtgcccggtcagcggaatcaggtggatttaggacaggtgagagggcctggaacggtgacggcttcgaatgagtggagacggaccaataaggcgttgacacctcaagaggtttatcgagctgttgtccgaccttatgagtacacccagggatatcacgttttgatggattatctcaccaaaaactttgagaccagcgatgtcctccgcgtcgttcgctccctcgcatccttccgtccctcgcttatcgccctccaaatgtccatgtcagaagaagatgaagtgttcctcgaaaaatcgttccaacgtaccatgatcgaacttgaaaaactcatttcatattgtgccacaccgacagcagtgtggcgacggacaggcgaagtgtgttatgccaatccagagttttgtgagctagtgggtaagacggataatgagttgctttcgaggaagacgtatatctatcaactttttgccaagccttctgtggtatcatactgggaaggcttctcgacgcacgcattcgaaaatacgactcaaaactttttccagtctatctcattagcattagatgctggtgaggttaatccttgtacttgctgtttcactatccgtcgtgatgtgtttgatctcccgtctgtggtgattggtcaattcttaccgatcccctctgagacgcaataa

SEQ ID NO: 1458 - protein, 612 aa, Cryptococcus neoformans var. neoformans B-3501A
MQDHQWVHPEGLSSAGSPLSFTNSTPTPNASLFNYAPSQHHHRPSTSSGYHMINPSGLGRSSSGIYVGGIGSLTTVAPTAIPPPVAVEKPLVPVFGGDSGRGRPKSKNPKAKPQGLGTERKARKKVAKACLACQKSHLTCDEQRPCTRCVKKGMADKCVEGVRKKAKYLMEGDERLSSSMQSQASSVHSMSPQSIHQSLPTMATLPTQSTDSQIQDVWLANAIQRQNPTPNINIAPGMSMNQSDVWGTQSAEITPGTYSGYSTTAGTAANNEYQMLDAMFSSLSPVFPGLNDSLDDTSRQIANVTQAGTNLDLVNNSGPNSFDPQQPWINPSPSQSANTYNPTPSGSSVPGTGISPSTYGGSEVSPHQQWGWGSMDAPGQVMLDGSGVPGQRNQVDLGQVRGPGTVTASNEWRRTNKALTPQEVYRAVVRPYEYTQGYHVLMDYLTKNFETSDVLRVVRSLASFRPSLIALQMSMSEEDEVFLEKSFQRTMIELEKLISYCATPTAVWRRTGEVCYANPEFCELVGKTDNELLSRKTYIYQLFAKPSVVSYWEGFSTHAFENTTQNFFQSISLALDAGEVNPCTCCFTIRRDVFDLPSVVIGQFLPIPSETQ

SEQ ID NO: 1459 - DNA, 1830 bp, Cryptococcus neoformans var. neoformans B-3501A
  CDS (1)..(1830)
atgcagaacaacgcccccagcagcttccaggggtaccccttccccccgcagcagtcagacctgtacacattcgccccggtcagccagcagcagcagcagctctactacgcagcacagccagccaccgaccagcacgcctccgcagactcctccgagagcgcagggccgtcgcagaagaagacgcccgccggggccaggaagcacggcgtgaaggaggagccagaggagtacggcaaggcggatgagccacggaagaagcgcacgaagaggtcggccgggaaggcgtgcgtgtactgcaggcgaagccatatggtgtgcgaaggcggcaggccgtgtgagcgatgtatcaagcgagaaatcccccatctctgccgtgactgcaccccgcctccccagaaccagcagtctccccataagcaagagcctcagcaacaacaacagactcagcagcaacagtctcttaatcagtctcaagtcttgccatcctcagcccagccgatgccagtgtataccgactccaactttgtccctagctggccattacttcccgatgctggcgcagctcaaatcccgttcagcgatgctccttcggaacagattcaaaacccaggggatgcgggtatcatgggtccgccgccattgggatcgtctagagaggacggggagctggctgctttgagcaaattcatgaaagacttgggcgttcctaatctccccaatgatttcctctccttcatgaaccagctggacaagccagacgctagcaacagtctatccattgcaggttcttccgacgcgaatctcttttcttcgtctggggcgccatacggtgttgggctaaacaagggcaaaggcaaactcaaccaaatgtccagaatcgacaaatacctcatggcggctgctgatcagccaaacggtacccgtgcctctcgtcttgcacaagtcatcaaggccaagtacgatgccggtcttctcaagccttacgactatgccaagggatacgaacgtatgaacaagtggatggagtctggacgggcggcacccaggatggacagtcgtgccgggtccgagataccggacgaaagcccgcagaggtcatcggccgcaatgaggaacggtagattgtctgttgctcctttggcgcccaatacacctgcattcgggaagagcatctcacctgaatctcgccgacgaatccttgctgctcttgctggcttcagaccaaagtttaggcaaatcgcaaagacattgaccaatgtcgacttggtatttgtagaagaagctatggagcgatggatgctcgagtatgacagggcttttgcttctatccataccccttcatgtatctggcgacgaacgggagaaatccaaaaagccaaccaagagttttccaacctgaccggtattcccgcatacatgttccgtgatggccaactttgtgtttacgaactcatggatgaagacagtgcggtaagatattgggaaggatacgcgaaaatcgcgttcgaccctagccaaagagcaatgtctatattctgtactctccacattcccctttcccttactcgccacccaccgcgtcacctcaccaacgccaattccaaccacatttccaaatcagccacttccgggcccccacaagcaccctacacgcccgaccttgcgttgccccaccaaaacatgctgttcaacgacggtgcaagctcggatgcgggcacagccatcggggaagagtatagggagatgaaatgtgcgtttagcgtgacgatcaggagagatgcatggggtgtaccggtcgcgattatgggacagtggattcccatccaatag

SEQ ID NO: 1460 - protein, 609 aa, Cryptococcus neoformans var. neoformans B-3501A
MQNNAPSSFQGYPFPPQQSDLYTFAPVSQQQQQLYYAAQPATDQHASADSSESAGPSQKKTPAGARKHGVKEEPEEYGKADEPRKKRTKRSAGKACVYCRRSHMVCEGGRPCERCIKREIPHLCRDCTPPPQNQQSPHKQEPQQQQQTQQQQSLNQSQVLPSSAQPMPVYTDSNFVPSWPLLPDAGAAQIPFSDAPSEQIQNPGDAGIMGPPPLGSSREDGELAALSKFMKDLGVPNLPNDFLSFMNQLDKPDASNSLSIAGSSDANLFSSSGAPYGVGLNKGKGKLNQMSRIDKYLMAAADQPNGTRASRLAQVIKAKYDAGLLKPYDYAKGYERMNKWMESGRAAPRMDSRAGSEIPDESPQRSSAAMRNGRLSVAPLAPNTPAFGKSISPESRRRILAALAGFRPKFRQIAKTLTNVDLVFVEEAMERWMLEYDRAFASIHTPSCIWRRTGEIQKANQEFSNLTGIPAYMFRDGQLCVYELMDEDSAVRYWEGYAKIAFDPSQRAMSIFCTLHIPLSLTRHPPRHLTNANSNHISKSATSGPPQAPYTPDLALPHQNMLFNDGASSDAGTAIGEEYREMKCAFSVTIRRDAWGVPVAIMGQWIPIQ

SEQ ID NO: 1461 - DNA, 1314 bp, Aspergillus oryzae
  CDS (1)..(1314)
atggctgaaggagacgcacccaaaaaggactcaaccgccaaagataactcgcgaaattctccagcgtccaaaggtgaaaacgctgctgcggggactcacgccagccccaagaagcgtcgcaaggttaatcatgcatgcgtctactgtcggcgatcggagcggccgtgtacacgatgtataaagcgcaatattggccacctgtgccatgacgagcctagagaaccttcaaagcgcgctcggagtgaacacgaacactctgtaggagatgacgaaagcgtgcagaacaatgacttttcgaacgtccttcaagttctcggttacaatgattggcttggtggtcaaagccaatttcaggatatgcacactttccatccttcgtatatgttcaatgctccggaggtcacaaatgagtacaaccttcttggtgacttcctgagtaacagtctcttggatgacggatctatgttccagaatgatgatctgcaggggatctactctgacccgacgttgatcggttcgatggcaacactcggtgggggacctaacgcggcgctacttcagcaatcgcaaccgccgcctttgacccagacccaaccatctcagggcgaatcaatccagggtccgattagtggagcggtcaatgataaagcgcgggaaacatattacatgacggcagcagatccttccgggtctgacccaccggaagagcgaatgaacaagctcctgaaggctaaatacgatgctggccttctcaggccatttaactacgtaaagggctacgccaggttaaaccaatatatggaaaagaatctgcagcaagcctcgcgccagaagattctccgacaactcgataaattcaggccaaagttccgggagagaatgcagagtctgacggatatcgagcttatccttgtggagatgtggtttgaacggagcttgatggaatacgatcgtgtcttcgctagtatggcgattccagcttgctgctggaggcgtacgggtgagatctttcgaggcaataaggagatggcagaattgatcggagttccaattgaaactttaagagatggcaagctagccattcacgaaattattgtggaagatcagcttgtgagctactgggagaaatttggagcaattgcttttgataatacacaaaaggcaatgctaacaagctgtacattgaaaagtcctgactctaacgctcctggcgatggaatcccttgctgcttttcattcacaatacggagagacccgcacaatatagatggccccatgagtttgctgtcaaggcgcttcagcttgagattttaa

SEQ ID NO: 1462 - protein, 437 aa, Aspergillus oryzae
MAEGDAPKKDSTAKDNSRNSPASKGENAAAGTHASPKKRRKVNHACVYCRRSERPCTRCIKRNIGHLCHDEPREPSKRARSEHEHSVGDDESVQNNDFSNVLQVLGYNDWLGGQSQFQDMHTFHPSYMFNAPEVTNEYNLLGDFLSNSLLDDGSMFQNDDLQGIYSDPTLIGSMATLGGGPNAALLQQSQPPPLTQTQPSQGESIQGPISGAVNDKARETYYMTAADPSGSDPPEERMNKLLKAKYDAGLLRPFNYVKGYARLNQYMEKNLQQASRQKILRQLDKFRPKFRERMQSLTDIELILVEMWFERSLMEYDRVFASMAIPACCWRRTGEIFRGNKEMAELIGVPIETLRDGKLAIHEIIVEDQLVSYWEKFGAIAFDNTQKAMLTSCTLKSPDSNAPGDGIPCCFSFTIRRDPHNIDGPMSLLSRRFSLRF

SEQ ID NO: 1463 - DNA, 1857 bp, Saccharomyces cerevisiae
  CDS (1)..(1857)
atgaccaaaaaactaccttcagagttgaaacagacgagaaagtctatccagacagcttgtgaattctgtcataccaaacatatacagtgtgacgtagggaggccatgtcaaaactgtttaaaaagaaatattgggaagttttgcagagataagaaaaggaaatcaagaaaacgaattgagaagcatggaacacaaccatacttgaatttggggaagaggctggtaatacatgatgtgccgtcgaagacggtatccccctcaagcgtacatctgcagcgagattttctatcttcagatcaggaaaaaccaggcaaaacacctgcccacaatacgaatatccaatatacgtataatataaatgataactttcaaagcgctggatctattccacgtattacgaacttcaatacgaataaccgccagaccgtcttagaaaatacttctaataatatatcagcttcacaagcagtacatttaatgaatgaccccatcatacccaccgtacggaagagtactctcaatttaaagtcgcatttcctagagcaacataaagcaatgcagcagccgctggctaccaattgtttggttgctacttcaaacgttcctgtgcactctggaatggacgatagtaataagagtgacgatgatgtcgatgacgaaactaatattcactttgatagtatgtggtgcaatgacgaatacatgaaattaaaggatatagtagatatttcaacgccgtttttaccgaataactcccagatattttccctccaagaatcagaatatcccaatcctagcgcatctacacggggaaattcgtcattgcatttaacgaaccttttaaactcgacaaaaagcgtgaatgaccaaaaggactcctcgatcggccattccacttctactttcaatacatatgatgaagtagtgtctaggccctttatatctttagacatgctgcatttgaatcgtggagcaaacgctaatacacacccatcacataacgccaaactggaaagcgaatgtgacagttctagtcactccgatgcagatctggagaaacatgataccgatttcatatcaccttcaaagtttcgtgaattagtaaagactcctcaagacctatatgacaataaatgtttaataaaaccgcataattacaagctcgcatacaccaaactgctaactactttaagaaaaaaatttcttgaaggagctgaaattgataaatctgcctcagtaaaagacgaacacagtacccaaaagcataatttgagatatgatttagaagttataatacgctctatactagaaagatatgctccaattttcatttcgttaacatccaatatgattgaagaggatttgctattacaggaagttaccttgcaaagggctttattagatttggagaacatggcaaaattagtaagctgcacaccgatgtgcatctggagaagatcaggcgagatttgttttgtcagtaacgaattctattctttaacaggttttaacaaaaatttactattagaccgcacctcctttatttttgaatatctggatcataaaagcgtttcgaattactttcaaatatttaacgaattgctggcatttggttacaatgatatcaataaaaggaaaaaactattgatgttgaacgcatgttcttctacctcgtcaaaaattacagaagggttttcttttactacggatggaaaagcaatctttactaagtgcaatttattattaagtaacggtctttatttgaagtgtgcctgttgttggacagtaaaaagggactcgtttaatatcccaattctcgtaatgggacaattgttaccaatttttgaaatggactga

SEQ ID NO: 1464 - protein, 618 aa, Saccharomyces cerevisiae
MTKKLPSELKQTRKSIQTACEFCHTKHIQCDVGRPCQNCLKRNIGKFCRDKKRKSRKRIEKHGTQPYLNLGKRLVIHDVPSKTVSPSSVHLQRDFLSSDQEKPGKTPAHNTNIQYTYNINDNFQSAGSIPRITNFNTNNRQTVLENTSNNISASQAVHLMNDPIIPTVRKSTLNLKSHFLEQHKAMQQPLATNCLVATSNVPVHSGMDDSNKSDDDVDDETNIHFDSMWCNDEYMKLKDIVDISTPFLPNNSQIFSLQESEYPNPSASTRGNSSLHLTNLLNSTKSVNDQKDSSIGHSTSTFNTYDEVVSRPFISLDMLHLNRGANANTHPSHNAKLESECDSSSHSDADLEKHDTDFISPSKFRELVKTPQDLYDNKCLIKPHNYKLAYTKLLTTLRKKFLEGAEIDKSASVKDEHSTQKHNLRYDLEVIIRSILERYAPIFISLTSNMIEEDLLLQEVTLQRALLDLENMAKLVSCTPMCIWRRSGEICFVSNEFYSLTGFNKNLLLDRTSFIFEYLDHKSVSNYFQIFNELLAFGYNDINKRKKLLMLNACSSTSSKITEGFSFTTDGKAIFTKCNLLLSNGLYLKCACCWTVKRDSFNIPILVMGQLLPIFEMD

SEQ ID NO: 1465 - DNA, 25 bp, Artificial sequence
  primer
atgtcagcaaacagtggtgtaaaac

SEQ ID NO: 1466 - DNA, 25 bp, Artificial sequence
  primer
ttatgacaaagggatgaaattcccg

SEQ ID NO: 1467 - protein, 714 aa, Artificial sequence
  consensus sequence
  Variant (3)..(4): Xaa in position 3 to 4 is any amino acid
  Variant (6)..(7): Xaa in position 6 to 7 is any amino acid
  Variant (8)..(8): Xaa in position 8 is any or no amino acid
  Variant (10)..(10): Xaa in position 10 is any amino acid
  Variant (11)..(11): Xaa in position 11 is any or no amino acid
  Variant (13)..(15): Xaa in position 13 to 15 is any amino acid
  Variant (19)..(19): Xaa in position 19 is any amino acid
  Variant (20)..(20): Xaa in position 20 is any or no amino acid
  Variant (22)..(22): Xaa in position 22 is any amino acid
  Variant (23)..(23): Xaa in position 23 is any or no amino acid
  Variant (25)..(29): Xaa in position 25 to 29 is any amino acid
  Variant (31)..(31): Xaa in position 31 is any amino acid
  Variant (33)..(214): Xaa in position 33 to 214 is any amino acid
  Variant (215)..(398): Xaa in position 215 to 398 is any or no amino acid
  Variant (400)..(401): Xaa in position 400 to 401 is any amino acid
  Variant (403)..(405): Xaa in position 403 to 405 is any amino acid
  Variant (407)..(408): Xaa in position 407 to 408 is any amino acid
  Variant (410)..(432): Xaa in position 410 to 432 is any amino acid
  Variant (433)..(455): Xaa in position 433 to 455 is any or no amino acid
  Variant (458)..(458): Xaa in position 458 is any amino acid
  Variant (460)..(465): Xaa in position 460 to 465 is any amino acid
  Variant (467)..(470): Xaa in position 467 to 470 is any amino acid
  Variant (471)..(471): Xaa in position 471 is any or no amino acid
  Variant (473)..(475): Xaa in position 473 to 475 is any amino acid
  Variant (477)..(480): Xaa in position 477 to 480 is any amino acid
  Variant (482)..(482): Xaa in position 482 is any amino acid
  Variant (484)..(485): Xaa in position 484 to 485 is any amino acid
  Variant (487)..(495): Xaa in position 487 to 495 is any amino acid
  Variant (496)..(496): Xaa in position 496 is any or no amino acid
  Variant (498)..(500): Xaa in position 498 to 500 is any amino acid
  Variant (508)..(512): Xaa in position 508 to 512 is any amino acid
  Variant (514)..(516): Xaa in position 514 to 516 is any amino acid
  Variant (518)..(524): Xaa in position 518 to 524 is any amino acid
  Variant (526)..(533): Xaa in position 526 to 533 is any amino acid
  Variant (534)..(579): Xaa in position 534 to 579 is any or no amino acid
  Variant (581)..(585): Xaa in position 581 to 585 is any amino acid
  Variant (586)..(586): Xaa in position 586 is any or no amino acid
  Variant (588)..(588): Xaa in position 588 is any amino acid
  Variant (590)..(598): Xaa in position 590 to 598 is any amino acid
  Variant (600)..(622): Xaa in position 600 to 622 is any amino acid
  Variant (623)..(681): Xaa in position 623 to 681 is any or no amino acid
  Variant (683)..(686): Xaa in position 683 to 686 is any amino acid
  Variant (688)..(689): Xaa in position 688 to 689 is any amino acid
  Variant (692)..(695): Xaa in position 692 to 695 is any amino acid
  Variant (697)..(700): Xaa in position 697 to 700 is any amino acid
  Variant (701)..(709): Xaa in position 701 to 709 is any or no amino acid
  Variant (711)..(713): Xaa in position 711 to 713 is any amino acid
ACXXCXXXHXXCXXXRPCXXCXXRXXXXXCXDXXXXXXXXXXXXXXXXXXXXXXXXXXXXXXXXXXXXXXXXXXXXXXXXXXXXXXXXXXXXXXXXXXXXXXXXXXXXXXXXXXXXXXXXXXXXXXXXXXXXXXXXXXXXXXXXXXXXXXXXXXXXXXXXXXXXXXXXXXXXXXXXXXXXXXXXXXXXXXXXXXXXXXXXXXXXXXXXXXXXXXXXXXXXXXXXXXXXXXXXXXXXXXXXXXXXXXXXXXXXXXXXXXXXXXXXXXXXXXXXXXXXXXXXXXXXXXXXXXXXXXXXXXXXXXXXXXXXXXXXXXXXXXXXXXXXXXXXXXXXXXXXXXXXXXXXXXXXXXXXXXXXXXXXXXXXXXXXXXXXXXXXXXXXXXXXXXXXXXXXXXXXXXPXXYXXXYXXLXXXXXXXXXXXXXXXXXXXXXXXXXXXXXXXXXXXXXXXXXXXXXXRPXFXXXXXXLXXXXXLXXXEXXXXRXLXXYXXXXXXXXXXPXXXWRRTGEIXXXXXEXXXLXXXXXXXLXXXXXXXXXXXXXXXXXXXXXXXXXXXXXXXXXXXXXXXXXXXXXXXXXXXXXXEXXXXXXSXVXXXXXXXXXAXXXXXXXXXXXXXXXXXXXXXXXXXXXXXXXXXXXXXXXXXXXXXXXXXXXXXXXXXXXXXXXXXXXXXXXXXXXXXXXXXXCXXXXTXXRDXXXXPXXXXXXXXXXXXXGXXXP

SEQ ID NO: 1468 - protein, 23 aa, Artificial sequence
  protein pattern
  Variant (2)..(2): Xaa in position 2 is any amino acid
  Variant (3)..(4): Xaa in position 3 to 4 is any or no amino acid
  Variant (6)..(7): Xaa in position 6 to 7 is any or no amino acid
  Variant (9)..(9): Xaa in position 9 is Ile, Leu or Val
  Variant (10)..(10): Xaa in position 10 is any amino acid
  Variant (11)..(11): Xaa in position 11 is Leu, Met or Val
  Variant (13)..(14): Xaa in position 13 to 14 is any amino acid
  Variant (15)..(15): Xaa in position 15 is Phe, Leu or Met
  Variant (16)..(16): Xaa in position 16 is Glu or Gln
  Variant (17)..(17): Xaa in position 17 is Lys or Arg
  Variant (18)..(18): Xaa in position 18 is any amino acid
  Variant (19)..(19): Xaa in position 19 is Leu or Met
  Variant (20)..(20): Xaa in position 20 is Ile, Leu, Met or Val
  Variant (21)..(21): Xaa in position 21 is Asp, Glu, Ser or Thr
  Variant (23)..(23): Xaa in position 23 is Asp, Glu or Lys
LXXXDXXLXXXEXXXXXXXXXYX

SEQ ID NO: 1469 - protein, 16 aa, Artificial sequence
  protein pattern
  Variant (4)..(4): Xaa in position 4 is any amino acid
  Variant (5)..(5): Xaa in position 5 is Asn or Arg
  Variant (7)..(7): Xaa in position 7 is any amino acid
  Variant (8)..(8): Xaa in position 8 is any or no amino acid
  Variant (10)..(14): Xaa in position 10 to 14 is any amino acid
  Variant (15)..(15): Xaa in position 15 is any or no amino acid
RPCXXCXXKXXXXXXC

SEQ ID NO: 1470 - protein, 15 aa, Artificial sequence
  protein pattern
  Variant (2)..(2): Xaa in position 2 is Phe, His or Tyr
  Variant (3)..(3): Xaa in position 3 is Asp, Glu, Asn or Ser
  Variant (5)..(6): Xaa in position 5 to 6 is any amino acid
  Variant (7)..(7): Xaa in position 7 is Ala, Gly or Thr
  Variant (9)..(10): Xaa in position 9 to 10 is any amino acid
  Variant (11)..(11): Xaa in position 11 is Leu or Met
  Variant (12)..(14): Xaa in position 12 to 14 is any amino acid
  Variant (15)..(15): Xaa in position 15 is Leu or Met
PXXYXXXYXXXXXXX

SEQ ID NO: 1471 - DNA, 1473 bp, Escherichia coli; identical to SEQ ID NO: 63
  CDS (1)..(1473): transl_table=11

SEQ ID NO: 1472 - protein, 490 aa, Escherichia coli; identical to SEQ ID NO: 64

SEQ ID NO: 1473 - DNA, 1527 bp, Linum usitatissimum
  CDS (1)..(1527)
atggggttcgagaagaaagagcatgaatttctgggcgagatcgggctgagctcgagcaatcctggctgttatgtgggtgggaaatggaaggctaatggacctgtgatcacaactacgaaccctgccaacaaccagacaattgctgaagtggttgagggttccatggaagactatgaggagggcttgaaagcttgcagtgaagcaacaaagacatggatgcaggttccagcaccaaagagaggtgagattgttaggcagattggagatgcactcagagccaaacttgatcatctcggccgtcttgtctctctcgagatgggcaagatactggctgaaggagtaggagaagttcaggaaattatcgacatgtgtgatttcgctgtcgggttgagcaggcaactgaacggatctattatcccttccgagcgcccgaaccacgccatgttggagatgtggaaccctctcggaattgttggtgttatcactgctttcaacttcccttgtgctgttcttggatggaatgcttgccttgcgctagtttgtggaaactgcgttgtctggaaaggtgctccaactacacctttggtcaccatagcaatgacaaagctgatcgctgaggtgctcgagaagaacaacttacctggtgcgatatttacatcgttatgtggtggtgccgaaattggtcaagccatagcgaaagacactcgcatacctctagtctccttcaccggcagttcaaaggtgggacaaatggtgcagcaaatagtcagccagagattcggcaaatgcttgctcgagttaagtggaaacaacgccattatcgttatggacgatgcagacgttcagcttgccgcccgttcggttctctttgctgctgttgggacagccggtcagcgatgcacaacttgccgtcggctgctcctccacgagagcatctacaagaaagtacttgatcagcttgtcgaagcttacaagcaagtgaaaatcggcgatccgttggagaaaggcaccctgcttggaccgttgcatactaccgaatcgaggaaaaacttcgagaggggaatcgagctcgtcaaatctcagggagggaatatcctgaccggaggatcgatcataaaatctgacgggaatttcgtacagccaacaattgtagaggttgctccaactgtagttgcagttaaagaagagctctttgctcctgttctgtatgttatgaaatttaagactttgcaagaggctattgatataaacaactcagtgccacaaggattgagcagttctatctttacccagaagcccgaaaccatcttcaaatggatcgggccactggggagcgactgcggtattgtgaatgtgaacataccgacaaatggtgcagaaatcggtggcgcatttggtggcgaaaaggctaccgggggtggtcgagaagctggaagtgattcgtggaagcagtacatgcgccgatccacttgcacaatcaattatggaaacgagttgcctctagctcaaggaatcaatttcggctag

SEQ ID NO: 1474 - protein, 508 aa, Linum usitatissimum
MGFEKKEHEFLGEIGLSSSNPGCYVGGKWKANGPVITTTNPANNQTIAEVVEGSMEDYEEGLKACSEATKTWMQVPAPKRGEIVRQIGDALRAKLDHLGRLVSLEMGKILAEGVGEVQEIIDMCDFAVGLSRQLNGSIIPSERPNHAMLEMWNPLGIVGVITAFNFPCAVLGWNACLALVCGNCVVWKGAPTTPLVTIAMTKLIAEVLEKNNLPGAIFTSLCGGAEIGQAIAKDTRIPLVSFTGSSKVGQMVQQIVSQRFGKCLLELSGNNAIIVMDDADVQLAARSVLFAAVGTAGQRCTTCRRLLLHESIYKKVLDQLVEAYKQVKIGDPLEKGTLLGPLHTTESRKNFERGIELVKSQGGNILTGGSIIKSDGNFVQPTIVEVAPTVVAVKEELFAPVLYVMKFKTLQEAIDINNSVPQGLSSSIFTQKPETIFKWIGPLGSDCGIVNVNIPTNGAEIGGAFGGEKATGGGREAGSDSWKQYMRRSTCTINYGNELPLAQGINFG

SEQ ID NO: 1475 - DNA, 870 bp, Saccharomyces cerevisiae; identical to SEQ ID NO: 764
  CDS (1)..(870)

SEQ ID NO: 1476 - protein, 289 aa, Saccharomyces cerevisiae; identical to SEQ ID NO: 765

SEQ ID NO: 1477 - DNA, 939 bp, Brassica napus
  CDS (1)..(939)
atgcccgaaattcagttaggtgctcatacgataagatcccatggagtcacggtcgcaaggttccacatgcatgactggcttatccttctgctgcttatagtcattgaagttgttttgaatgtcatcgaaccctttcaccgttttgttggagaggatatgctcactgatctcagataccctcttcaagacaacacagttcctttctgggctgtcccgttgatagcagttgtgctcccatttgttgtcatttctgtttattacttcatcagaagagatgtttatgacctgcatcatgcaatattaggtttgttgttctctgtactaataaccggtgttataaccgatgctataaaggatgctgtaggtaggcctcgtcctgacttcttttggcgttgtttccctgatggtagagggttctttcacaatgtcacaagggatgttttgtgtactggagataaagacgtggtcaaagagggacacaagagcttccccagcggccacacgtcttggtcgtttgctgggctaggctttctagcgttatacttgtcagggaaaatcagggtgtttgaccagagagggcatgtggcaaagctttgcattgtttttctacctctactagttgcagcgttggttggtgtatcccgagttgatgactattggcatcactggcaagatgtgtttggtggagctatcataggattaacagtggcctcgttttgttatctacaattctttccccctccatatgatccagacggttggggccctcatgcgtacttccaaatgctggcagactctagaaacgttgtccaaaattcagcaggaatgaataatctaagcgtgagtcaagctgagctggagaatgtgtacgttcatcaacaagggacttccatggagatatctagaagcaacacacgcgggacaccacaagaatgctag

SEQ ID NO: 1478 - protein, 312 aa, Brassica napus
MPEIQLGAHTIRSHGVTVARFHMHDWLILLLLIVIEVVLNVIEPFHRFVGEDMLTDLRYPLQDNTVPFWAVPLIAVVLPFVVISVYYFIRRDVYDLHHAILGLLFSVLITGVITDAIKDAVGRPRPDFFWRCFPDGRGFFHNVTRDVLCTGDKDVVKEGHKSFPSGHTSWSFAGLGFLALYLSGKIRVFDQRGHVAKLCIVFLPLLVAALVGVSRVDDYWHHWQDVFGGAIIGLTVASFCYLQFFPPPYDPDGWGPHAYFQMLADSRNVVQNSAGMNNLSVSQAELENVYVHQQGTSMEISRSNTRGTPQEC

SEQ ID NO: 1479 - DNA, 972 bp, Brassica napus
  CDS (1)..(972)
atgatgagagaggcgcaacaaggcactcacactctgaggtcccacggaatgacactagcaagaactcacatgcacgactggatcatactcgtactactcgtcatcctcgagtgcatcctcctcataatccacccgttttaccgctttgtcggtaaagacatgatgactgatctaagctaccctctaaagagcaacaccgtacctatctggtctgtcccggtctatgcgatgctgctgccactggctatattcgtcttcatctacttccgtaggagagacgtatacgatcttcaccacgcggtgctaggtctgttgtactctgttctggtgacggctgtgcttactgattcgataaagaacgcagttggtagaccgcgtcctgacttcttctggcgttgttttcctgatggcaaagctgtttatgatagtctgggtgatgtgatatgtcatggtgataaaagtgttataagggaagggcacaagagcttcccaagcggacacacttcatggtctttcgcgggactaggattcttgtcgctgtacttatcagggaagattcgagcgtttgatggtaaaggacacgttgcgaagctgtgcattgtcatactccctttgctagttgcagctcttgttggtatctctcgtgtggatgactattggcatcactggcaagacgtctttgctggaggcttgctaggtcttgtggtctctacgttctgttatcttcagttcttcccgccaccatatcgcactgaagcttggggaccatatgcttacttccttgtgttggaggcggcacgagctcaaactcaagctcaagcagcagagaatgaagcggagcaacgaccgcctctgggtgataacggtgaagaggaagacggtgggtttatgggactacatttggtggataatccgagtatgaggagagaagaagcagatgtagaagctggtagagtgccgtctagaggctga

SEQ ID NO: 1480 - protein, 323 aa, Brassica napus
MMREAQQGTHTLRSHGMTLARTHMHDWIILVLLVILECILLIIHPFYRFVGKDMMTDLSYPLKSNTVPIWSVPVYAMLLPLAIFVFIYFRRRDVYDLHHAVLGLLYSVLVTAVLTDSIKNAVGRPRPDFFWRCFPDGKAVYDSLGDVICHGDKSVIREGHKSFPSGHTSWSFAGLGFLSLYLSGKIRAFDGKGHVAKLCIVILPLLVAALVGISRVDDYWHHWQDVFAGGLLGLVVSTFCYLQFFPPPYRTEAWGPYAYFLVLEAARAQTQAQAAENEAEQRPPLGDNGEEEDGGFMGLHLVDNPSMRREEADVEAGRVPSRG

SEQ ID NO: 1481 - DNA, 972 bp, Brassica napus
  CDS (1)..(972)
atggtctttggatcgttcttctcttctctcaagttctggggaaattctcaggaacaagagccgcagagagggaggatgcaggagatagatcttggtatccacacaataaggagccatggagtcggcgtcgcctctaaacacaaacacgactggattatactcgtgatcttggtggccatcgagatcggtttgcagctcatatctcctttctacagatacgttgggagagacatgatgactgatcttaaatacccttttaacgacaacaccgttcctgtctggtcagtaccaatctacgctgtgctgctcccgatcatagtgttcgtctgtttctacatgaagagaacatgcgtgtacgatcttcaccacagcattctcgggctgctcttcaccgtcttgataactggtatcatcactgactccatcaagctcgccacgggacgccctcgtcctaacttctactggcgttgcttccctgacgggaatgaggtgtacaacgcgttgggtggtgtgatatgccatggtaaaccaggagaggttaaagaaggtcacaaaagcttcccgagtggacacacgtcttggtctttcgcgggacttggctacctctcgctttacttgtctggtaaagtcaaggccttcaacagagaagggcatgttgctaagctctgccttgtgttcgctcctcttctcgcggcttgtctcgtggggatatcgcgtgtggatgactactggcatcattggcaagacgtatttgctggagctcttattggtctctttgtggctgccttttgttaccgtcagttttatcctaatccttaccatgaagaagggtggggtccttatgcttatttcagagcggcgcaggagcgtggacaagcgcagaatggagatgtgttgaggacaatgtctttgcaggtggaaccaacttctcttgaaaacatggagtctggcacttcatctgttcgaagatga

SEQ ID NO: 1482 - protein, 323 aa, Brassica napus
MVFGSFFSSLKFWGNSQEQEPQRGRMQEIDLGIHTIRSHGVGVASKHKHDWIILVILVAIEIGLQLISPFYRYVGRDMMTDLKYPFNDNTVPVWSVPIYAVLLPIIVFVCFYMKRTCVYDLHHSILGLLFTVLITGIITDSIKLATGRPRPNFYWRCFPDGNEVYNALGGVICHGKPGEVKEGHKSFPSGHTSWSFAGLGYLSLYLSGKVKAFNREGHVAKLCLVFAPLLAACLVGISRVDDYWHHWQDVFAGALIGLFVAAFCYRQFYPNPYHEEGWGPYAYFRAAQERGQAQNGDVLRTMSLQVEPTSLENMESGTSSVRR

SEQ ID NO: 1483 - DNA, 2571 bp, Saccharomyces cerevisiae; identical to SEQ ID NO: 818
  CDS (1)..(2571)

SEQ ID NO: 1484 - protein, 856 aa, Saccharomyces cerevisiae; identical to SEQ ID NO: 819

SEQ ID NO: 1485 - DNA, 2595 bp, Glycine max
  CDS (1)..(2595)
atggatcagttcaaaggacagcctcgccttccgaaattcgtcgttccgaaacgctatgacattaggctcaagcccgacctcgtcgcgcaccgttttgcaggttccgtcgccgtcaacctcgacatcgtcgccgccacctctttcatcgttctcaatgccgccgaactcgacgttagcaacgacgccgtttcattcaccaaccaagattcctccaaggttattaaaccttctcgagttgagttgtttgaaaatgatgagattctggttttggagttcccagaggaattacctattggcttcggtgtcttgtccattcgctttgaaggaatcttgaatgatagaatgaaaggcttctaccgaagtacctatgagcacaatggtgagaagaagactatggcagttacacagtttgaaccagctgatgccaggcgatgctttccttgttgggatgaacctgcttgcaaggctactttcaagatcacattggatgtgccttcagagctcgttgctctttccaacatgccaattgttgaagaaataacagacggagatctgaaaacagtctcgtatcaagaatcaccaattatgtctacatatttggttgcggttgttgttggtttatttgattatgtggaagatcatacctcagatggggtcaaagtccgggtgtattgtcaagttggtaaggcaaaccaggggaaatttgcacttgatgtagctgtgaaaactttggaactatacaagggttactttgccactccctactcgctgccaaaattggatatgattgcaatccctgatttcgctgctggagccatggagaactatggtttagttacatatcgggagactgctttgctatatgatgaccagcattctgctgctgcaaataaacagagggttgcaactgtagtagctcatgaactagcacaccagtggtttggcaaccttgttacaatggagtggtggacacatttgtggctgaatgaggggtttgcaacatgggtgagctatttagccactgatagctgttttcctgagtggaaaatatggtctcaatttcttcatgaatctactgagggtcttaagctggatggacttgcggagtcccacccaattgaggtagagatcaatcatgcttgtgagattgatgaaatatttgatgcaataagttatagaaaaggtgcatctgtaattaggatgctgcaaagctatcttggtgccgaatgctttcagaggtcgctggcttcatatataaaaagacatgcttgctcaaatgctaagactgaggatctatgggctgcacttgaggaaggatctggtgaacctgtgaacaagttaatgacctcatggacaaagcagaagggatatcctgttgtatctgttaaagtcaatgatcagaaattggaatttaatcagtcgcaattcttgtcaagcggtgctcaaggagaaggccattggattgttccaataacattatgctttggctcttatgatgtccacaagagtttcctcttgcaatcaaaatctgaaacacatgatgtcaaagatttccttggttccacacacaaaggtttaaattgttggattaaacttaatgtggatcaggctggtttctacagggtgaagtatgatgagctgcttgctgctagacttagatatgcagtagagaaacaactcttatctgcatcagaccgatttggcattttggatgattcatttgcactttgtatggctcgccaggaatcattgacctccttgattaacttgatgggatcttacagggaggaagttgattataccgtgttgtctaacctgataactataagtcttaaagttcaacgtattgcagctgatgcagtaccagacttactagaatatttcaagcagttctttattaacctttttcagtactctgctgagaggcttggttgggagcctaaaccaggagagagtcatgtagatgcaatgttgagaggagaaattttgactgcccttgctatgtttggtcacgatttaacactggatgaagcaagcaagcgttttcaggcattcttagaaaacagaaatacaccacttcttccacctgatataagaaaggcggcatatgtagctgtaatgcaacgggcaagcaaatctaacagatcgggttatgaatcccttttgaaagtatataaggaagctgacctaagtcaggagaaaacgcgtattctgggctctctggcatcttcacgtgatccagatctaattcttgaagctctaaacttcatgttgtcatctgaggttcgtagtcaggatgctgtttttggacttgctgttacccgggaaggacgagatgcagcttgggcatggcttaaggaaaattgggaacacctcataaaaacatatggttcaggatttttgataactcggtttgtcggtgcagttgtctcaccgtttgcttcctttgagaaggccaaggaggtagaggaattctttgctacccacgctatgccatccattgctagaacgttaaggcagagccttgagcgggtcaatatcaatgcaattgggttcagagtgttcagaacgaaaataggcttggtgatgctatga

SEQ ID NO: 1486 - protein, 864 aa, Glycine max
MDQFKGQPRLPKFVVPKRYDIRLKPDLVAHRFAGSVAVNLDIVAATSFIVLNAAELDVSNDAVSFTNQDSSKVIKPSRVELFENDEILVLEFPEELPIGFGVLSIRFEGILNDRMKGFYRSTYEHNGEKKTMAVTQFEPADARRCFPCWDEPACKATFKITLDVPSELVALSNMPIVEEITDGDLKTVSYQESPIMSTYLVAVVVGLFDYVEDHTSDGVKVRVYCQVGKANQGKFALDVAVKTLELYKGYFATPYSLPKLDMIAIPDFAAGAMENYGLVTYRETALLYDDQHSAAANKQRVATVVAHELAHQWFGNLVTMEWWTHLWLNEGFATWVSYLATDSCFPEWKIWSQFLHESTEGLKLDGLAESHPIEVEINHACEIDEIFDAISYRKGASVIRMLQSYLGAECFQRSLASYIKRHACSNAKTEDLWAALEEGSGEPVNKLMTSWTKQKGYPVVSVKVNDQKLEFNQSQFLSSGAQGEGHWIVPITLCFGSYDVHKSFLLQSKSETHDVKDFLGSTHKGLNCWIKLNVDQAGFYRVKYDELLAARLRYAVEKQLLSASDRFGILDDSFALCMARQESLTSLINLMGSYREEVDYTVLSNLITISLKVQRIAADAVPDLLEYFKQFFINLFQYSAERLGWEPKPGESHVDAMLRGEILTALAMFGHDLTLDEASKRFQAFLENRNTPLLPPDIRKAAYVAVMQRASKSNRSGYESLLKVYKEADLSQEKTRILGSLASSRDPDLILEALNFMLSSEVRSQDAVFGLAVTREGRDAAWAWLKENWEHLIKTYGSGFLITRFVGAVVSPFASFEKAKEVEEFFATHAMPSIARTLRQSLERVNINAIGFRVFRTKIGLVML

SEQ ID NO: 1487 - DNA, 1335 bp, Saccharomyces cerevisiae; identical to SEQ ID NO: 925
  CDS (1)..(1335)

SEQ ID NO: 1488 - protein, 444 aa, Saccharomyces cerevisiae; identical to SEQ ID NO: 926

SEQ ID NO: 1489 - DNA, 1242 bp, Oryza sativa
  CDS (1)..(1242)
atgggaagtttgggagcgattctgaagaatccagatgacttttaccctctgctgaagctgaaaatggcggcgagaaacgccgagaagcagatcccgccggagccacattgggcgttctgctacacaatgctccacaaggtttctcgaagtttcgccctcgtcattcagcaactcggcaccgagcttcgcaacgccgtttgcatattttatttggttctgcgagctctcgacaccgttgaggatgatactagcatagaaacagatgtcaaggtgccaatactgatagcctttcaccgtcatatttatgatcgtgattggcacttttcatgtggcacaaaggagtacaaagttctaatggaccagtttcatcatgtttcaactgcttttctggaacttgggaagaactaccaggaagcaattgaggacattaccaaaagaatgggtgctggaatggccaaatttatttgcaaggaggtagaaacaattgatgactatgatgaatattgtcactatgtggcgggacttgttgggctgggtttatcaaagcttttccatgcgtctggttcagaagatctggctccagatgacctttccaattcaatgggcttgtttctacagaaaacaaacattattcgagattatctggaagacatcaatgagatccccaagtcacgcatgttttggccacgacagatttggagtaaatatgttaacaaacttgaggatttgaaatatgaggagaactctgttaaggcagtgcaatgcttaaatgacatggtcactaatgctctgatgcatgctgaagattgcttaacatacatggctgctttacgtgacccgcctatatttcgcttttgtgctataccccagataatggcaattggaacacttgcattatgctacaataacattgaggtcttcagaggtgtagttaaaatgaggcgaggtttaactgccaaagtgattgaccgaactacgactatggctgatgtctatggtgctttttttttttttttttctatgttggagtccaaggttgacaaaaatgatcccaatgcaactaaagcattgagcaggctggaagctatacagaaaacttgcagagaatctggtctcttgagtaaaaggaaatcttacattgtgaaggatgaaagtggatatggctcaaccatgattatcgtactggtcatcatggtttccatcattttttcttatctgtctgctagccaccaaaataactag

SEQ ID NO: 1490 - protein, 413 aa, Oryza sativa
MGSLGAILKNPDDFYPLLKLKMAARNAEKQIPPEPHWAFCYTMLHKVSRSFALVIQQLGTELRNAVCIFYLVLRALDTVEDDTSIETDVKVPILIAFHRHIYDRDWHFSCGTKEYKVLMDQFHHVSTAFLELGKNYQEAIEDITKRMGAGMAKFICKEVETIDDYDEYCHYVAGLVGLGLSKLFHASGSEDLAPDDLSNSMGLFLQKTNIIRDYLEDINEIPKSRMFWPRQIWSKYVNKLEDLKYEENSVKAVQCLNDMVTNALMHAEDCLTYMAALRDPPIFRFCAIPQIMAIGTLALCYNNIEVFRGVVKMRRGLTAKVIDRTTTMADVYGAFFFFFSMLESKVDKNDPNATKALSRLEAIQKTCRESGLLSKRKSYIVKDESGYGSTMIIVLVIMVSIIFSYLSASHQNN

SEQ ID NO: 1491 - DNA, 1257 bp, Helianthus annuus
  CDS (1)..(1257)
atggggagtctgaaggcagtgttgaagcatccggatgatttttacccgctgttgaagttgaagatggcggcgaagaaggcggagaagcagatcccggcggagccacactggggcttctgttattccatgcttcataaggtttctagaagtttcgctcttgttattcaacagcttaatcccgagcttcgtgacgctgtgtgcattttttatttggtccttcgagctcttgacactgtcgaggatgatacaagcatagatgctgatatcaaagtgcccattctgatcgcctttcatcagcatatctatgatcgtgactggcactttgcatgtggtacaaaggagtacaaagttctcatggaccagttccaccatgttgctactgcctttctggagcttaagaaaggttaccaggaggcaatagaggatataacaaagagaatgggtgcgggaatggcaaagtttatatgtaaagaggtggagacggttgatgattatgatgagtattgtcattatgttgcgggtcttgtgggattaggattgtcaaagctcttccatgcctcgggcacagaaatactgtttccagattctatgtccaattctatgggtttatttcttcagaaaacaaatatcatacgtgattatctagaggacataaacgagatacccaagtcacgcatgttttggcctcgcgaaatatggagtaaatatgtgaataaactagaggacttcaagtatgaagacaactctgaaaaggccgttcaatgccttaatgatatggtgacaaacgctttaatacacatcgaagactgtttgaagtatatgtctgacttgcgtgatccggctatcttcaggttttgtgctatacctcagatcatggcaattggaaccctagctttatgctacaataacgttcaagttttccagggtgttgttaagatgagacgtggtcttactgcaaaagtaattgatcgaaccagaacaatgggcgatgtgtaccaggccttttatgatttttcttcaatgctcaagtcaaaggttgacatgcgtgatcccaatgccacaacaacaataaccaggattgaagcagctcagaaaatatgcaaggactctggcgcccttaacaacaggaaatcttacatagttgagagcgagccaagctacagtccagctctgattgcattgcttttcattatactggcgattctatatgcgtatacgtctgctaatcgacaaaataaaatcaaagttactctgtaa

SEQ ID NO: 1492 - protein, 418 aa, Helianthus annuus
MGSLKAVLKHPDDFYPLLKLKMAAKKAEKQIPAEPHWGFCYSMLHKVSRSFALVIQQLNPELRDAVCIFYLVLRALDTVEDDTSIDADIKVPILIAFHQHIYDRDWHFACGTKEYKVLMDQFHHVATAFLELKKGYQEAIEDITKRMGAGMAKFICKEVETVDDYDEYCHYVAGLVGLGLSKLFHASGTEILFPDSMSNSMGLFLQKTNIIRDYLEDINEIPKSRMFWPREIWSKYVNKLEDFKYEDNSEKAVQCLNDMVTNALIHIEDCLKYMSDLRDPAIFRFCAIPQIMAIGTLALCYNNVQVFQGVVKMRRGLTAKVIDRTRTMGDVYQAFYDFSSMLKSKVDMRDPNATTTITRIEAAQKICKDSGALNNRKSYIVESEPSYSPALIALLFIILAILYAYTSANRQNKIKVTL

SEQ ID NO: 1493 - DNA, 942 bp, Saccharomyces cerevisiae; identical to SEQ ID NO: 1021
  CDS (1)..(942)

SEQ ID NO: 1494 - protein, 313 aa, Saccharomyces cerevisiae; identical to SEQ ID NO: 1022

SEQ ID NO: 1495 - DNA, 996 bp, Helianthus annuus
  CDS (1)..(996)
atggcgcggtctccggacctccctccactaccaccgccgcctcctttcttctggggcgaaaccccagaagaagaatactacaaatctcaaggcgttcacaacaataaactctatttccagacaccaaatgggaaaatcttcacccaatcatggctaccaattgatgaaaaccaacccgttaaagccacagtatttatgactcacggttatggctctgatatcagctggtgttttcagaaaatatgtatagagtatgctaagtggggatatgcggtgtttgcagcggatctccttggtcatggtcgatccgatggactccatggttaccttggtgacatggataaggttgctgcgacgtcgttgtcgtattttctcagcgttcgccaaagcgaaacgtattgtaaacttccagcgtttttgtttggggagtcgatgggtggtttgatcactatgcttatgtatttccaatcagagcctgacacgtggagcggtttgatcttctcggccccactctttgtgattccggaaaatatgataccatcgaagctacatttgaccatgtacgggctactatttggatttgcggacacatgggcagcaatgccggataataagatggttggaaaggcgattagagatcccgaaaaactcaagataatagtggtaaatccgaagcgatatgctggtaggccaagagtcggtacaatgagagaagttgtaagggtcaccaattacgtacaaaacagctttcataaggttaaagctcctttcttgacattgcacgggacagctgacggggtcacatgtccgactgggtcccagatgttgtacgagaaggcatcgagtgaggacaagacattgaaactatacgagggtatgtaccattcgttgatacaaggcgagcctgacgaagctgctaatcttgtgttggcggatatgagaaagtggattgatgagaggacagaaaagtatggggctaaaagtaacggtaactaa

SEQ ID NO: 1496 - protein, 331 aa, Helianthus annuus
MARSPDLPPLPPPPPFFWGETPEEEYYKSQGVHNNKLYFQTPNGKIFTQSWLPIDENQPVKATVFMTHGYGSDISWCFQKICIEYAKWGYAVFAADLLGHGRSDGLHGYLGDMDKVAATSLSYFLSVRQSETYCKLPAFLFGESMGGLITMLMYFQSEPDTWSGLIFSAPLFVIPENMIPSKLHLTMYGLLFGFADTWAAMPDNKMVGKAIRDPEKLKIIVVNPKRYAGRPRVGTMREVVRVTNYVQNSFHKVKAPFLTLHGTADGVTCPTGSQMLYEKASSEDKTLKLYEGMYHSLIQGEPDEAANLVLADMRKWIDERTEKYGAKSNGN

SEQ ID NO: 1497 - DNA, 1650 bp, Saccharomyces cerevisiae; identical to SEQ ID NO: 1157
  CDS (1)..(1650)

SEQ ID NO: 1498 - protein, 549 aa, Saccharomyces cerevisiae; identical to SEQ ID NO: 1158

SEQ ID NO: 1499 - DNA, 2010 bp, Brassica napus
  CDS (1)..(2010)
atgtcggcaggtaacggaaatgctaacggtgacggaggcttcagcttcccgaaaggaccagcgatgccgaagataacgacgggagctaagaggggtagcgaaatatgccacgatgacagtggtccgacggtgaaggcaacgacgatcgatgagcttcactcgttgcagaagaagcgttctgctcccaccacacctattaaccagagcggcgccgccgctttcgccgccgtctcggaggaggagcgccagaagattcaactccagtctatcagtgcatcattggcgtcgttgacgagagagtctggacccaaagtggtgagaggagatccggcggagaagaaggccgacggttccactactccggcgtacgcacacggccagcatcactccatcttctctccggacttaggagcagtcagtgacagctccttgaaattcacccacgtcctctacaacctctcccctgcagagctctacgagcaggctatcaagtacgagaaaggctcgttcatcacttccaatggagctctggcgactctttccggtgcgaaaactggtcgtgctccgagggataagcgtgtcgttagagatgccacgacagagggcgagctttggtggggaaagggttcgcctaatatcgagatggatgaacataccttcatggtgaacagagaaagagctgttgattacttgaactccttggaaaaggtgtttgtgaatgatcagttcttgaactgggacccggagaacagaatcaaagtcagaatcgtctcagctagagcttaccactctctcttcatgcacaacatgtgtatccgaccaactcccgaggagcttgagagcttcggtactccggacttcactatatacaacgctgggcagtttccgtgtaaccgttacactcactacatgacttcctccactagcgtagacctgaatctcagtaggagggagatggttatactgggaactcagtatgctggtgagatgaagaagggtctcttcagcgtgatgcattaccttatgcctaagcgtcggatcctctcccttcactctggttgcaatatgggcaaagagggaaatgttgctctcttctttggactctcagggactgggaagacaacgctgtctactgatcacaacaggtacctgataggagatgatgagcactgttggactgagactggtgtctcgaacattgagggtggatgctatgctaagtgcgttgatctttctagggagaaggagcctgatatctggaacgctatcaagtttggaacagttttggaaaatgttgtgtttgatgagcacaccagagaagtggattattctgataaatccgttaccgagaacacacgtgctgcttaccctattgagttcattccaaacgcgaaaataccttgcgttggtccacaccccaagaatgtgattcttctggcatgtgatgcctttggtgttctcccacctgtgagcaagctgaacctggcgcaaaccatgtaccacttcattagtggttacactgctctggttgctgggacagaggacggtatcaaggagccaacagctacattctcagcatgctttggtgcagctttcataatgctgcatcctacaaagtacgcagctatgttggccgagaagatgaagacgcaaggcgctactggatggctcgttaacactggttggtccggtggcagctatggagttggaaacaggatcaagctggcgtatactaggaagatcatcgatgcaatccattcaggtagcttgttgaaggcgaactacaagaagacggagatatttgggtttgaaatcccaactgagatcgaagggataccttcagagatcttggatccgatcaactcgtggtctgataagaaagcacataaggagactctgttgaagctgggaggtttgttcaagaagaactttgagacgttcgctaaccacaagattggtgtggatggtaagctcacggaggagattctcgctgctggtcctatcttttaa

SEQ ID NO: 1500 - protein, 669 aa, Brassica napus
MSAGNGNANGDGGFSFPKGPAMPKITTGAKRGSEICHDDSGPTVKATTIDELHSLQKKRSAPTTPINQSGAAAFAAVSEEERQKIQLQSISASLASLTRESGPKVVRGDPAEKKADGSTTPAYAHGQHHSIFSPDLGAVSDSSLKFTHVLYNLSPAELYEQAIKYEKGSFITSNGALATLSGAKTGRAPRDKRVVRDATTEGELWWGKGSPNIEMDEHTFMVNRERAVDYLNSLEKVFVNDQFLNWDPENRIKVRIVSARAYHSLFMHNMCIRPTPEELESFGTPDFTIYNAGQFPCNRYTHYMTSSTSVDLNLSRREMVILGTQYAGEMKKGLFSVMHYLMPKRRILSLHSGCNMGKEGNVALFFGLSGTGKTTLSTDHNRYLIGDDEHCWTETGVSNIEGGCYAKCVDLSREKEPDIWNAIKFGTVLENVVFDEHTREVDYSDKSVTENTRAAYPIEFIPNAKIPCVGPHPKNVILLACDAFGVLPPVSKLNLAQTMYHFISGYTALVAGTEDGIKEPTATFSACFGAAFIMLHPTKYAAMLAEKMKTQGATGWLVNTGWSGGSYGVGNRIKLAYTRKIIDAIHSGSLLKANYKKTEIFGFEIPTEIEGIPSEILDPINSWSDKKAHKETLLKLGGLFKKNFETFANHKIGVDGKLTEEILAAGPIF

1-35. (canceled)

36. A method for producing a transgenic plant cell, plant or part thereof with increased yield, preferably under condition of transient and repetitive abiotic stress as compared to a corresponding non-transformed wild type plant cell, plant or part thereof by increasing or generating the activity of at least one protein selected from the group consisting of phosphoenolpyruvate carboxylkinase, arginine/alanine aminopeptidase, D-alanyl-D-alanine carboxypeptidase, diacylglycerol pyrophosphate phosphatase, dityrosine transporter, farnesyl-diphosphate farnesyl transferase, NAD+-dependent betaine aldehyde dehydrogenase, serine hydrolase, transcriptional regulator involved in conferring resistance to ketoconazole, uridine kinase, yal043c-a-protein, ybr071w-protein, and ydr445c-protein.

37. The method of claim 36, wherein the at least one protein comprises a polypeptide selected from the group consisting of:
(i) a polypeptide comprising a polypeptide, a consensus sequence, or at least one polypeptide motif as depicted in column 5 or 7 of Table II or of Table IV, respectively;
(ii) an expression product of a nucleic acid molecule comprising a polynucleotide as depicted in column 5 or 7 of Table I; and
(iii) a functional equivalent of (i) or (ii).

38. The method of claim 36, wherein expression of at least one nucleic acid molecule comprising a nucleic acid molecule selected from the group consisting of:
a) a nucleic acid molecule encoding the polypeptide shown in column 5 or 7 of Table II;
b) a nucleic acid molecule shown in column 5 or 7 of Table I;
c) a nucleic acid molecule, which, as a result of the degeneracy of the genetic code, can be derived from a polypeptide sequence depicted in column 5 or 7 of Table II and confers an increased yield, preferably under condition of transient and repetitive abiotic stress as compared to a corresponding non-transformed wild type plant cell, plant or part thereof;
d) a nucleic acid molecule having at least 30% identity with the nucleic acid molecule sequence of a polynucleotide comprising the nucleic acid molecule shown in column 5 or 7 of Table I and confers an increased yield, preferably under condition of transient and repetitive abiotic stress as compared to a corresponding non-transformed wild type plant cell, plant or part thereof;
e) a nucleic acid molecule encoding a polypeptide having at least 30% identity with the amino acid sequence of the polypeptide encoded by one of the nucleic acid molecules of (a) to (c) and having the activity represented by a nucleic acid molecule comprising a polynucleotide as depicted in column 5 of Table I and confers an increased yield, preferably under condition of transient and repetitive abiotic stress as compared to a corresponding non-transformed wild type plant cell, plant or part thereof;
f) a nucleic acid molecule which hybridizes with one of the nucleic acid molecule of (a) to (c) under stringent hybridization conditions and confers an increased yield, preferably under condition of transient and repetitive abiotic stress as compared to a corresponding non-transformed wild type plant cell, plant or part thereof;
g) a nucleic acid molecule encoding a polypeptide which can be isolated with the aid of monoclonal or polyclonal antibodies made against a polypeptide encoded by one of the nucleic acid molecules of (a) to (e) and having the activity represented by a nucleic acid molecule comprising a polynucleotide as depicted in column 5 of Table I;
h) a nucleic acid molecule encoding a polypeptide comprising the consensus sequence or one or more polypeptide motifs as shown in column 7 of Table IV and preferably having the activity represented by a nucleic acid molecule comprising a polynucleotide as depicted in column 5 of Table II or IV;
i) a nucleic acid molecule encoding a polypeptide having the activity represented by a protein as depicted in column 5 of Table II and confers an increased yield, preferably under condition of transient and repetitive abiotic stress as compared to a corresponding non-transformed wild type plant cell, plant or part thereof;
j) a nucleic acid molecule which comprises a polynucleotide, which is obtained by amplifying a cDNA library or a genomic library using the primers in column 7 of Table III and preferably having the activity represented by a nucleic acid molecule comprising a polynucleotide as depicted in column 5 of Table II or IV; and
k) a nucleic acid molecule which is obtainable by screening a suitable nucleic acid library under stringent hybridization conditions with a probe comprising a complementary sequence of the nucleic acid molecule of (a) or (b) or with a fragment thereof, having at least 15 nt, preferably 20 nt, 30 nt, 50 nt, 100 nt, 200 nt, or 500 nt of a nucleic acid molecule complementary to one of the nucleic acid molecule sequences characterized in (a) to (e) and encoding a polypeptide having the activity represented by a protein comprising a polypeptide as depicted in column 5 of Table II;
is increased or generated.

39. A trangenic plant cell, plant or part thereof with increased yield, preferably under condition of transient and repetitive abiotic stress as compared to a corresponding non-transformed wild type plant cell, plant or part thereof produced by the method of claim 36.

40. The transgenic plant cell, plant or part thereof of claim 39 derived from a monocotyledonous plant.

41. The transgenic plant cell, plant or part thereof of claim 39 derived from a dicotyledonous plant.

42. The transgenic plant cell, plant or part thereof of claim 39 , wherein the plant is selected from the group consisting of maize, wheat, rye, oat, triticale, rice, barley, soybean, peanut, cotton, oil seed rape, including canola and winter oil seed rape, corn, manihot, pepper, sunflower, flax, borage, safflower, linseed, primrose, rapeseed, turnip rape, tagetes, solanaceous plants, potato, tobacco, eggplant, tomato, Vicia species, pea, alfalfa, coffee, cacao, tea, Salix species, oil palm, coconut, perennial grass, forage crops, and Arabidopsis thaliana.

43. The transgenic plant cell, plant or part thereof of claim 39, derived from a gymnosperm plant, preferably spruce, pine, and fir.

44. A seed produced by the transgenic plant of claim 39, wherein the seed is genetically homozygous for a transgene conferring increased yield, preferably under condition of transient and repetitive abiotic stress as compared to a corresponding non-transformed wild type plant cell, plant or part thereof.

45. An isolated nucleic acid molecule comprising a nucleic acid molecule selected from the group consisting of:
a) a nucleic acid molecule encoding the polypeptide shown in column 5 or 7 of Table II B;
b) a nucleic acid molecule shown in column 5 or 7 of Table I B;
c) a nucleic acid molecule, which, as a result of the degeneracy of the genetic code, can be derived from a polypeptide sequence depicted in column 5 or 7 of Table II and confers an increased yield, preferably under condition of transient and repetitive abiotic stress as compared to a corresponding non-transformed wild type plant cell, plant or part thereof;
d) a nucleic acid molecule having at least 30% identity with the nucleic acid molecule sequence of a polynucleotide comprising the nucleic acid molecule shown in column 5 or 7 of Table I and confers an increased yield, preferably under condition of transient and repetitive abiotic stress as compared to a corresponding non-transformed wild type plant cell, plant or part thereof;
e) a nucleic acid molecule encoding a polypeptide having at least 30% identity with the amino acid sequence of the polypeptide encoded by one of the nucleic acid molecules of (a) to (c) and having the activity represented by a nucleic acid molecule comprising a polynucleotide as depicted in column 5 of Table I and confers an increased yield, preferably under condition of transient and repetitive abiotic stress as compared to a corresponding non-transformed wild type plant cell, plant or part thereof;
f) a nucleic acid molecule which hybridizes with one of the nucleic acid molecules of (a) to (c) under stringent hybridization conditions and confers increased yield, preferably under condition of transient and repetitive abiotic stress as compared to a corresponding non-transformed wild type plant cell, plant or part thereof;
g) a nucleic acid molecule encoding a polypeptide which can be isolated with the aid of monoclonal or polyclonal antibodies made against a polypeptide encoded by one of the nucleic acid molecules of (a) to (e) and having the activity represented by a nucleic acid molecule comprising a polynucleotide as depicted in column 5 of Table I;
h) a nucleic acid molecule encoding a polypeptide comprising the consensus sequence or one or more polypeptide motifs as shown in column 7 of Table IV and preferably having the activity represented by a nucleic acid molecule comprising a polynucleotide as depicted in column 5 of Table II or IV;
i) a nucleic acid molecule encoding a polypeptide having the activity represented by a protein as depicted in column 5 of Table II and confers an increased yield, preferably under condition of transient and repetitive abiotic stress as compared to a corresponding non-transformed wild type plant cell, plant or part thereof;
j) a nucleic acid molecule which comprises a polynucleotide, which is obtained by amplifying a cDNA library or a genomic library using the primers in column 7 of Table III and preferably having the activity represented by a nucleic acid molecule comprising a polynucleotide as depicted in column 5 of Table II or IV;
and
k) a nucleic acid molecule which is obtainable by screening a suitable nucleic acid library under stringent hybridization conditions with a probe comprising a complementary sequence of the nucleic acid molecule of (a) or (b) or with a fragment thereof, having at least 15 nt, preferably 20 nt, 30 nt, 50 nt, 100 nt, 200 nt, or 500 nt of a nucleic acid molecule complementary to one of the nucleic acid molecule sequences characterized in (a) to (e) and encoding a polypeptide having the activity represented by a protein comprising a polypeptide as depicted in column 5 of Table II;
whereby the nucleic acid molecule according to (a) to (j) is at least in one or more nucleotides different from the sequence depicted in column 5 or 7 of Table I A and preferably which encodes a protein which differs at least in one or more amino acids from the protein sequences depicted in column 5 or 7 of Table II A.

46. A nucleic acid construct comprising the nucleic acid molecule as defined in claim 38 and one or more regulatory elements, wherein expression of said nucleic acid molecule in a host cell results in increased yield, preferably under condition of transient and repetitive abiotic stress as compared to a corresponding non-transformed wild type plant cell, plant or part thereof.

47. A vector comprising the nucleic acid molecule as defined in claim 38 or a nucleic acid construct comprising said nucleic acid molecule, wherein expression of said nucleic acid molecule in a host cell results in increased yield, preferably under condition of transient and repetitive abiotic stress as compared to a corresponding non-transformed wild type plant cell, plant or part thereof.

48. A host cell transformed stably or transiently with the nucleic acid molecule as defined in claim 38, a nucleic acid construct comprising said nucleic acid molecule, or a vector comprising said nucleic acid molecule or said nucleic acid construct, wherein, due to the transformation, the host cell has an increased yield, preferably under condition of transient and repetitive abiotic stress as compared to a corresponding non-transformed wild type plant cell, plant or part thereof.

49. A process for producing a polypeptide, comprising expressing the polypeptide in the host cell of claim 48.

50. A polypeptide encoded by the nucleic acid molecule as defined in claim 38, or produced by a process comprising expressing the polypeptide in a host cell transformed with said nucleic acid molecule, wherein the polypeptide distinguishes over the polypeptide sequence as shown in Table II by one or more amino acids.

51. An antibody, which binds specifically to the polypeptide of claim 50.

52. A plant tissue, propagation material, harvested material, or a plant, comprising the host cell of claim 48.

53. A process for the identification of a compound conferring an increased yield in a plant cell, plant or part thereof, preferably under condition of transient and repetitive abiotic stress as compared to a corresponding non-transformed wild type plant cell, plant or part thereof, comprising:
a) culturing a plant cell, plant or part thereof maintaining a plant expressing a polypeptide encoded by the nucleic acid molecule as defined in claim 38 conferring an increased yield under condition of transient and repetitive abiotic stress as compared to a corresponding non-transformed wild type plant cell, plant or part thereof; a non-transformed wild type plant, plant or part thereof; and a readout system capable of interacting with the polypeptide under suitable conditions which permit the interaction of the polypeptide with said readout system in the presence of a compound or a sample comprising a plurality of compounds and capable of providing a detectable signal in response to the binding of a compound to said polypeptide under conditions which permit the expression of said readout system and of the polypeptide encoded by said nucleic acid molecule;
b) identifying if the compound is an effective agonist by detecting the presence or absence or increase of a signal produced by said readout system.

54. A method for the production of an agricultural composition comprising identifying a compound conferring an increased yield in a plant cell, plant or part thereof according to the process of claim 53, and formulating the compound in a form acceptable for an application in agriculture.

55. A composition comprising the nucleic acid molecule as defined in claim 38, a nucleic acid construct comprising said nucleic acid molecule and one or more regulatory elements, a vector comprising said nucleic acid molecule or said nucleic acid construct, a polypeptide encoded by said nucleic acid molecule or produced by a process comprising expressing the polypeptide in a host cell transformed with said nucleic acid molecule, or an antibody which binds specifically to said polypeptide, and optionally an agricultural acceptable carrier.

56. An isolated polypeptide as depicted in column 7 of Table II, preferably of Table II B, which is selected from yeast, preferably Saccharomyces cerevisiae.

57. A method of producing a transgenic plant cell, plant or part thereof with increased yield, preferably under condition of transient and repetitive abiotic stress compared to a corresponding non transformed wild type plant cell, plant or part thereof; comprising:
a) transforming a plant cell or a part of a plant with a vector comprising the nucleic acid molecule as defined in claim 38 or a nucleic acid construct comprising said nucleic acid molecule; and
b) generating from said plant cell or said part of a plant a transgenic plant with increased yield, preferably under condition of transient and repetitive abiotic stress as compared to a corresponding non-transformed wild type plant,
wherein expression of said nucleic acid molecule results in increased yield in the transgenic plant cell, plant or part thereof, preferably under condition of transient and repetitive abiotic stress as compared to a corresponding non-transformed wild type plant cell, plant or part thereof.

58. A method of producing a transgenic plant with increased yield compared to a corresponding non transformed wild type plant under conditions of environmental stress by increasing or generating the activity of at least one protein selected from the group consisting of phosphoenolpyruvate carboxylkinase, arginine/alanine aminopeptidase, D-alanyl-D-alanine carboxypeptidase, diacylglycerol pyrophosphate phosphatase, dityrosine transporter, farnesyl-diphosphate farnesyl transferase, NAD+-dependent betaine aldehyde dehydrogenase, mine hydrolase, transcriptional regulator involved in conferring resistance to ketoconazole, uridine kinase, yal043c-a-protein, ybr071w-protein, and ydr445c-protein.

59. A method for selection of plants or plant cells with increased yield, preferably under condition of transient and repetitive abiotic stress as compared to a corresponding non-transformed wild type plant cell, plant or part thereof, comprising utilizing the nucleic acid molecule as defined in claim 38 as a marker.

60. A method for detection of stress in plants or plant cells, comprising utilizing the nucleic acid molecule as defined in claim 38 as a marker.

61. The trangenic plant cell, plant or part thereof of claim 39, wherein the transient and repetitive abiotic environmental stress is selected from the group consisting of salinity, drought, temperature, metal, chemical, pathogenic and oxidative stresses, or combinations thereof.

62. The trangenic plant cell, plant or part thereof of claim 39, wherein the transient and repetitive abiotic environmental stress is drought, preferably cycling drought.

63. A transgenic plant cell or plant comprising a nucleic acid molecule encoding a polypeptide having the activity of a phosphoenolpyruvate carboxylkinase, an arginine/alanine aminopeptidase, a D-alanyl-D-alanine carboxypeptidase, a diacylglycerol pyrophosphate phosphatase, a dityrosine transporter, a farnesyl-diphosphate farnesyl transferase, a NAD+-dependent betaine aldehyde dehydrogenase, a serine hydrolase, a transcriptional regulator involved in conferring resistance to ketoconazole, a uridine kinase, a yal043c-a-protein, a ybr071w-protein, or a ydr445c-protein, wherein said polypeptide confers increased yield, preferably under condition of transient and repetitive abiotic stress as compared to a corresponding non-transformed wild type plant cell, plant or part thereof, preferably when said polypeptide is overexpressed.

64. The transgenic plant cell, plant or part thereof of claim 39 that has:
i) an increased yield under transient and repetitive nutrient limited conditions which would be limiting for growth for a non-transformed wild type plant cell, plant or part thereof
ii) an increased yield under conditions where water would be limiting for growth for a non-transformed wild type plant cell, plant or part thereof;
iii) a increased yield under conditions of drought, preferably cycling drought, which would be limiting for growth for a non-transformed wild type plant cell, plant or part thereof
and/or
iv) an increased yield under conditions of low humidity which would be limiting for growth for a non-transformed wild type plant cell, plant or part thereof.

65. A method for increasing the yield per acre in mega-environments where the plants do not achieve or no longer achieve their yield potential by cultivating the transgenic plant of claim 39.

66. A method for increasing the yield per acre in mega environments comprising:
a) performing a soil analysis to measure the level of nutrients available in the soil;
b) comparing the result with the value necessarily for achieving the yield potential of a class/genera of a plant; and
c) cultivating the plant of the respective class/genera according to claim 39 in case at east one nutrient is limited.

67. A method for increasing the yield per acre in mega environments comprising:
a) measuring the precipitation over a time period of at least one plant generation;
b) comparing with the value for achieving the yield potential of a class/genera of a plant; and
c) cultivating the plant of the respective class/genera according to claim 39 in case the precipitation is decreased.

68. A method for increasing the yield per acre in mega environments comprising:
a) measuring the time periods between the rainfalls over a time period of at least one plant generation;
b) comparing with the value for achieving the yield potential of a class/genera of a plant; and
c) cultivating the plant of the respective class/genera according to claim 39 in case the dry season is increased.
